(19) United States
(12) Patent Application Publication
(10) Pub. No.: US 2003/0158396 A1
(43) Pub. Date: Aug. 21, 2003

(54) Identification of polynucleotides encoding novel helicobacter polypeptides in the helicobacter genome

(76) Inventors: Harold Kleanthous, Newtonville, MA (US); Amal Al-Garawi, Brookline, MA (US); Charles Miller, Medford, MA (US); Jean-Francois Tomb, Baltimore, MD (US); Raymond P. Oomen, Ontario (CA)

Correspondence Address: CLARK & ELBING LLP, 101 FEDERAL STREET, BOSTON, MA, 02110, US

(21) Appl. No.: 09/882,227

(22) Filed: Jun. 15, 2001

Related U.S. Application Data
(63) Continuation of application No. 08/902,615, filed on Jul. 29, 1997, now abandoned.

(51) Int. Cl. C07H 21/02; C07H 21/04

(52) U.S. Cl. 536/23.1

(57) ABSTRACT

The invention provides Helicobacter polypeptides that can be used in vaccination methods for preventing or treating Helicobacter infection, and polynucleotides that encode these polypeptides.

### PRIORITY INFORMATION

[0001] This application is a continuation of, and claims priority from, U.S. Ser. No. 08/902,615, filed on Jul. 29, 1997, which is incorporated by reference herein in its entirety.

### FIELD OF THE INVENTION

[0002] The invention relates to Helicobacter antigens and corresponding polynucleotide molecules that can be used in methods to prevent or treat Helicobacter infection in mammals, such as humans.

### BACKGROUND OF THE INVENTION

[0003] Helicobacter is a genus of spiral, gram-negative bacteria that colonize the gastrointestinal tracts of mammals. Several species colonize the stomach, most notably H. pylori, H. heilmanii, H. felis, and H. mustelae. Although H. pylori is the species most commonly associated with human infection, H. heilmanii and H. felis have also been isolated from humans, but at lower frequencies than H. pylori. Helicobacter infects over 50% of adult populations in developed countries and nearly 100% in developing countries and some Pacific rim countries, making it one of the most prevalent infections worldwide.

[0004] Helicobacter is routinely recovered from gastric biopsies of humans with histological evidence of gastritis and peptic ulceration. Indeed, H. pylori is now recognized as an important pathogen of humans, in that the chronic gastritis it causes is a risk factor for the development of peptic ulcer diseases and gastric carcinoma. It is thus highly desirable to develop safe and effective vaccines for preventing and treating Helicobacter infection.

[0005] A number of Helicobacter antigens have been characterized or isolated. These include urease, which is composed of two structural subunits of approximately 30 and 67 kDa (Hu et al., Infect. Immun. 58:992, 1990; Dunn et al., J. Biol. Chem. 265:9464, 1990; Evans et al., Microbial Pathogenesis 10:15, 1991; Labigne et al., J. Bact., 173:1920, 1991); the 87 kDa vacuolar cytotoxin (VacA) (Cover et al., J. Biol. Chem. 267:10570, 1992; Phadnis et al., Infect. Immun. 62:1557, 1994; WO 93/18150); a 128 kDa immunodominant antigen associated with the cytotoxin (CagA, also called TagA; WO 93/18150; U.S. Pat. No. 5,403,924); 13 and 58 kDa heat shock proteins HspA and HspB (Suerbaum et al., Mol. Microbiol. 14:959, 1994; WO 93/18150); a 54 kDa catalase (Hazell et al., J. Gen. Microbiol.137:57, 1991); a 15 kDa histidine-rich protein (Hpn) (Gilbert et al., Infect. Immun. 63:2682, 1995); a 20 kDa membrane-associated lipoprotein (Kostrcynska et al., J. Bact. 176:5938, 1994); a 30 kDa outer membrane protein (Bolin et 15 al., J. Clin. Microbiol. 33:381, 1995); a lactoferrin receptor (FR 2,724,936); and several porins, designated HopA, HopB, HopC, HopD, and HopE, which have molecular weights of 48-67 kDa (Exner et al., Infect. Immun. 63:1567, 1995; Doig et al., J. Bact. 177:5447, 1995). Some of these proteins have been proposed as potential vaccine antigens. In particular, urease is believed to be a vaccine candidate (WO 94/9823; WO 95/22987; WO 95/3824; Michetti et al., Gastroenterology 107:1002, 1994). Nevertheless, it is thought that several antigens may ultimately be necessary in a vaccine.

### SUMMARY OF THE INVENTION

[0006] The invention provides polynucleotide molecules that encode Helicobacter polypeptides, designated GHPO7 (SEQ ID NO: 2), GHPO8 (SEQ ID NO: 4), GHPO9 (SEQ ID NO: 6), GHPO10 (SEQ ID NO: 8), GHPO12 (SEQ ID NO: 10), GHPO25 (SEQ ID NO: 12), GHPO27 (SEQ ID NO: 14), GHPO29 (SEQ ID NO: 16), GHPO30 (SEQ ID NO: 18), GHPO37 (SEQ ID NO: 20), GHPO49 (SEQ ID NO: 22), GHPO51 (SEQ ID NO: 24), GHPO54 (SEQ ID NO: 26), GHPO65 (SEQ ID NO: 28), GHPO66 (SEQ ID NO: 30), GHPO68 (SEQ ID NO: 32), GHPO70 (SEQ ID NO: 34), GHPO77 (SEQ ID NO: 36), GHPO83 (SEQ ID NO: 38), GHPO85 (SEQ ID NO: 40), GHPO87 (SEQ ID NO: 42), GHPO91 (SEQ ID NO: 44), GHPO92 (SEQ ID NO: 46), GHPO96 (SEQ ID NO: 48), GHPO97 (SEQ ID NO: 50), GHPO111 (SEQ ID NO: 52), GHPO115 (SEQ ID NO: 54), GHPO117 (SEQ ID NO: 56), GHPO123 (SEQ ID NO: 58), GHPO124 (SEQ ID NO: 60), GHPO126 (SEQ ID NO: 62), GHPO127 (SEQ ID NO: 64), GHPO128 (SEQ ID NO: 66), GHPO131 (SEQ ID NO: 68), GHPO133 (SEQ ID NO: 70), GHPO140 (SEQ ID NO: 72), GHPO141 (SEQ ID NO: 74), GHPO145 (SEQ ID NO: 76), GHPO147 (SEQ ID NO: 78), GHPO166 (SEQ ID NO: 80), GHPO181 (SEQ ID NO: 82), GHPO187 (SEQ ID NO: 84), GHPO188 (SEQ ID NO: 86), GHPO192 (SEQ ID NO: 88), GHPO202 (SEQ ID NO: 90), GHPO204 (SEQ ID NO: 92), GHPO205 (SEQ ID NO: 94), GHPO212 (SEQ ID NO: 96), GHPO218 (SEQ ID NO: 98), GHPO226 (SEQ ID NO:l00), GHPO231 (SEQ ID NO: 102), GHPO236 (SEQ ID NO: 104), GHPO239 (SEQ ID NO: 106), GHPO245 (SEQ ID NO: 108), GHPO246 (SEQ ID NO: 110), GHPO248 (SEQ ID NO: 112), GHPO253 (SEQ ID NO: 114), GHPO265 (SEQ ID NO: 116), GHPO266 (SEQ ID NO: 118), GHPO271 (SEQ ID NO: 120), GHPO272 (SEQ ID NO: 122), GHPO286 (SEQ ID NO: 124), GHPO291 (SEQ ID NO: 126), GHPO292 (SEQ ID NO: 128), GHPO297 (SEQ ID NO: 130), GHPO304 (SEQ ID NO: 132), GHPO307 (SEQ ID NO: 134), GHPO324 (SEQ ID NO: 136), GHPO326 (SEQ ID NO: 138), GHPO331 (SEQ ID NO: 140), GHPO343 (SEQ ID NO: 142), GHPO345 (SEQ ID NO: 144), GHPO346 (SEQ ID NO: 146), GHPO352 (SEQ ID NO: 148), GHPO355 (SEQ ID NO: 150), GHPO363 (SEQ ID NO: 152), GHPO369 (SEQ ID NO: 154), GHPO376 (SEQ ID NO: 156), GHPO378 (SEQ ID NO: 158), GHPO388 (SEQ ID NO: 160), GHPO396 (SEQ ID NO: 162), GHPO403 (SEQ ID NO: 164), GHPO410 (SEQ ID NO: 166), GHPO415 (SEQ ID NO: 168), GHPO421 (SEQ ID NO: 170), GHPO439 (SEQ ID NO: 172), GHPO441 (SEQ ID NO: 174), GHPO443 (SEQ ID NO: 176), GHPO453 (SEQ ID NO: 178), GHPO455 (SEQ ID NO: 180), GHPO464 (SEQ ID NO: 182), GHPO467 (SEQ ID NO: 184), GHPO468 (SEQ ID NO: 186), GHPO470 (SEQ ID NO: 188), GHPO486 (SEQ ID NO: 190), GHPO487 (SEQ ID NO: 192), GHPO488 (SEQ ID NO: 194), GHPO489 (SEQ ID NO: 196), GHPO498 (SEQ ID NO: 198), GHPO501 (SEQ ID NO: 200), GHPO504 (SEQ ID NO: 202), GHPO512 (SEQ ID NO: 204), GHPO517 (SEQ ID NO: 206), GHPO520 (SEQ ID NO: 208), GHPO528 (SEQ ID NO: 210), GHPO530 (SEQ ID NO: 212), GHPO532 (SEQ ID NO: 214), GHPO548 (SEQ ID NO: 216), GHPO561 (SEQ ID NO: 218), GHPO564 (SEQ ID NO: 220), GHPO572 (SEQ ID NO: 222), GHPO573 (SEQ ID NO: 224), GHPO574 (SEQ ID NO: 226), GHPO577 (SEQ ID NO: 228), GHPO579 (SEQ ID NO: 230), GHPO583 (SEQ ID NO: 232), GHPO588 (SEQ ID NO: 234), GHPO593 (SEQ ID NO: 236), GHPO597 (SEQ ID NO: 238), GHPO598 (SEQ ID NO: 240), GHPO604 (SEQ ID NO: 242), GHPO606 (SEQ ID NO: 244), GHPO611 (SEQ ID NO: 246), GHPO612 (SEQ ID NO: 248), GHPO615 (SEQ ID NO: 250), GHPO632 (SEQ ID NO: 252), GHPO633 (SEQ ID NO: 254), GHPO637 (SEQ ID NO: 256), GHPO651 (SEQ ID NO: 258), GHPO663 (SEQ ID NO: 260), GHPO686 (SEQ ID NO: 262), GHPO693 (SEQ ID NO: 264), GHPO698 (SEQ ID NO: 266), GHPO703 (SEQ ID NO: 268), GHPO704 (SEQ ID NO: 270), GHPO705 (SEQ ID NO: 272), GHPO707 (SEQ ID NO: 274), GHPO721 (SEQ ID NO: 276), GHPO727 (SEQ ID NO: 278), GHPO728 (SEQ ID NO: 280), GHPO733 (SEQ ID NO: 282), GHPO758 (SEQ ID NO: 284), GHPO763 (SEQ ID NO: 286), GHPO771 (SEQ ID NO: 288), GHPO774 (SEQ ID NO: 290), GHPO776 (SEQ ID NO: 292), GHPO783 (SEQ ID NO: 294), GHPO800 (SEQ ID NO: 296), GHPO806 (SEQ ID NO: 298), GHPO807 (SEQ ID NO: 300), GHPO808 (SEQ ID NO: 302), GHPO809 (SEQ ID NO: 304), GHPO811 (SEQ ID NO: 306), GHPO815 (SEQ ID NO: 308), GHPO819 (SEQ ID NO: 310), GHPO841 (SEQ ID NO: 312), GHPO843 (SEQ ID NO: 314), GHPO846 (SEQ ID NO: 316), GHPO875 (SEQ ID NO: 318), GHPO892 (SEQ ID NO: 320), GHPO902 (SEQ ID NO: 322), GHPO904 (SEQ ID NO: 324), GHPO906 (SEQ ID NO: 326), GHPO908 (SEQ ID NO: 328), GHPO921 (SEQ ID NO: 330), GHPO923 (SEQ ID NO: 332), GHPO926 (SEQ ID NO: 334), GHPO933 (SEQ ID NO: 336), GHPO939 (SEQ ID NO: 338), GHPO940 (SEQ ID NO: 340), GHPO943 (SEQ ID NO: 342), GHPO951 (SEQ ID NO: 344), GHPO961 (SEQ ID NO: 346), GHPO965 (SEQ ID NO: 348), GHPO990 (SEQ ID NO: 350), GHPO991 (SEQ ID NO: 352), GHPO998 (SEQ ID NO: 354), GHPO1001 (SEQ ID NO: 356), GHPO1005 (SEQ ID NO: 358), GHPO1033 (SEQ ID NO: 360), GHPO1039 (SEQ ID NO: 362), GHPO1041 (SEQ ID NO: 364), GHPO1043 (SEQ ID NO: 366), GHPO1044 (SEQ ID NO: 368), GHPO1051 (SEQ ID NO: 370), GHPO1058 (SEQ ID NO: 372), GHPO1060 (SEQ ID NO: 374), GHPO1075 (SEQ ID NO: 376), GHPO1077 (SEQ ID NO: 378), GHPO1082 (SEQ ID NO: 380), GHPO1083 (SEQ ID NO: 382), GHPO1086 (SEQ ID NO: 384), GHPO1087 (SEQ ID NO: 386), GHPO1090 (SEQ ID NO: 388), GHPO1097 (SEQ ID NO: 390), GHPO1098 (SEQ ID NO: 392), GHPO1103 (SEQ ID NO: 394), GHPO1113 (SEQ II) NO: 396), GHPO1116 (SEQ ID NO: 398), GHPO1123 (SEQ ID NO: 400), GHPO1125 (SEQ ID NO: 402), GHPO1129 (SEQ ID NO: 404), GHPO1130 (SEQ ID NO: 406), GHPO1134 (SEQ ID NO: 408), GHPO1161 (SEQ ID NO: 410), GHPO1166 (SEQ ID NO: 412), GHPO1170 (SEQ ID NO: 414), GHPO1175 (SEQ ID NO: 416), GHPO1181 (SEQ ID NO: 418), GHPO1186 (SEQ ID NO: 420), GHPO1188 (SEQ ID NO: 422), GHPO1191 (SEQ ID NO: 424), GHPO1193 (SEQ ID NO: 426), GHPO1196 (SEQ ID NO: 428), GHPO1204 (SEQ ID NO: 430), GHPO1210 (SEQ ID NO: 432), GHPO1211 (SEQ ID NO: 434), GHPO1216 (SEQ ID NO: 436), GHPO1218 (SEQ ID NO: 438), GHPO1220 (SEQ ID NO: 440), GHPO1223 (SEQ ID NO: 442), GHPO1226 (SEQ ID NO: 444), GHPO1240 (SEQ ID NO: 446), GHPO1246 (SEQ ID NO: 448), GHPO1251 (SEQ ID NO: 450), GHPO1252 (SEQ ID NO: 452), GHPO1261 (SEQ ID NO: 454), GHPO1265 (SEQ ID NO: 456), GHPO1267 (SEQ ID NO: 458), GHPO1278 (SEQ ID NO: 460), GHPO1282 (SEQ ID NO: 462), GHPO1283 (SEQ ID NO: 464), GHPO1287 (SEQ ID NO: 466), GHPO1292 (SEQ ID NO: 468), GHPO1293 (SEQ ID NO: 470), GHPO1302 (SEQ ID NO: 472), GHPO1309 (SEQ ID NO: 474), GHPO1317 (SEQ ID NO: 476), GHPO1318 (SEQ ID NO: 478), GHPO1321 (SEQ ID NO: 480), GHPO1325 (SEQ ID NO: 482), GHPO1341 (SEQ ID NO: 484), GHPO1351 (SEQ ID NO: 486), GHPO1354 (SEQ ID NO: 488), GHPO1363 (SEQ ID NO: 490), GHPO1371 (SEQ ID NO: 492), GHPO1381 (SEQ ID NO: 494), GHPO1401 (SEQ ID NO: 496), GHPO1402 (SEQ ID NO: 498), GHPO1403 (SEQ ID NO: 500), GHPO1408 (SEQ ID NO: 502), GHPO1416 (SEQ ID NO: 504), GHPO1420 (SEQ ID NO: 506), GHPO1428 (SEQ ID NO: 508), GHPO1437 (SEQ ID NO: 510), GHPO1439 (SEQ ID NO: 512), GHPO1460 (SEQ ID NO: 514), GHPO1463 (SEQ ID NO: 516), GHPO1472 (SEQ ID NO: 518), GHPO1474 (SEQ ID NO: 520), GHPO1484 (SEQ ID NO: 522), GHPO1489 (SEQ ID NO: 524), GHPO1494 (SEQ ID NO: 526), GHPO1495 (SEQ ID NO: 528), GHPO1498 (SEQ ID NO: 530), GHPO1499 (SEQ ID NO: 532), GHPO1500 (SEQ ID NO: 534), GHPO1503 (SEQ ID NO: 536), GHPO1504 (SEQ ID NO: 538), GHPO1510 (SEQ ID NO: 540), GHPO1518 (SEQ ID NO: 542), GHPO1533 (SEQ ID NO: 544), GHPO1541 (SEQ ID NO: 546), GHPO1544 (SEQ ID NO: 548), GHPO1548 (SEQ ID NO: 550), GHPO1565 (SEQ ID NO: 552), GHPO1575 (SEQ ID NO: 554), GHPO1582 (SEQ ID NO: 556), GHPO1595 (SEQ ID NO: 558), GHPO1597 (SEQ ID NO: 560), GHPO1599 (SEQ ID NO: 562), GHPO1601 (SEQ ID NO: 564), GHPO1609 (SEQ ID NO: 566), GHPO1613 (SEQ ID NO: 568), GHPO1614 (SEQ ID NO: 570), GHPO1626 (SEQ ID NO: 572), GHPO1628 (SEQ ID NO: 574), GHPO1639 (SEQ ID NO: 576), GHPO1640 (SEQ ID NO: 578), GHPO1641 (SEQ ID NO: 580), GHPO1646 (SEQ ID NO: 582), GHPO1662 (SEQ ID NO: 584), GHPO1667 (SEQ ID NO: 586), GHPO1668 (SEQ ID NO: 588), GHPO1670 (SEQ ID NO: 590), GHPO1671 (SEQ ID NO: 592), GHPO1672 (SEQ ID NO: 594), GHPO1678 (SEQ ID NO: 596), GHPO1684 (SEQ ID NO: 598), GHPO1695 (SEQ ID NO: 600), GHPO1697 (SEQ ID NO: 602), GHPO1701 (SEQ ID NO: 604), GHPO1719 (SEQ ID NO: 606), GHPO1723 (SEQ ID NO: 608), GHPO1732 (SEQ ID NO: 610), GHPO1739 (SEQ ID NO: 612), GHPO1741 (SEQ ID NO: 614), GHPO1747 (SEQ ID NO: 616), GHPO1749 (SEQ ID NO: 618), GHPO1750 (SEQ ID NO: 620), GHPO1751 (SEQ ID NO: 622), GHPO1755 (SEQ ID NO: 624), GHPO1771 (SEQ ID NO: 626), GHPO1786 (SEQ ID NO: 628), and GHPO1789 (SEQ ID NO: 630), which can be used, e.g., in methods to prevent, treat, or diagnose Helicobacter infection. The sequences of polynucleotides that encode these polypeptides are shown in the sequence listing (odd numbers, up to SEQ ID NO: 629). Those skilled in the art will understand that the invention also includes polynucleotide molecules that encode mutants and derivatives of these polypeptides, which can result from the addition, deletion, or substitution of non-essential amino acids, as is described further below.

[0007] In addition to the polynucleotide molecules described above, the invention includes the corresponding polypeptides (i.e., polypeptides encoded by the polynucleotide molecules of the invention, or fragments thereof), and monospecific antibodies that specifically bind to these polypeptides. The polypeptides of the invention include those having the amino acid sequences shown in the sequence listing (even numbers, up to SEQ ID NO: 630), as well as mature forms of proteins having sequences shown in the sequence listing in their unprocessed forms, and fragments thereof.

[0008] The present invention has many applications and includes expression cassettes, vectors, and cells transformed or transfected with the polynucleotides of the invention. Accordingly, the present invention provides (i) methods for producing polypeptides of the invention in recombinant host systems and related expression cassettes, vectors, and transformed or transfected cells; (ii) live vaccine vectors, such as pox virus, Salmonella typhimurium, and Vibrio cholerae vectors, that contain polynucleotides of the invention (such vaccine vectors being useful in, e.g., methods for preventing or treating Helicobacter infection) in combination with a diluent or carrier, and related pharmaceutical compositions and associated therapeutic and/or prophylactic methods; (iii) therapeutic and/or prophylactic methods involving administration of polynucleotide molecules, either in a naked form or formulated with a delivery vehicle, polypeptides or mixtures of polypeptides, or monospecific antibodies of the invention, and related pharmaceutical compositions; (iv) methods for detecting the presence of Helicobacter in biological samples, which can involve the use of polynucleotide molecules, monospecific antibodies, or polypeptides of the invention; and (v) methods for purifying polypeptides of the invention by antibody-based affinity chromatography.

### DETAILED DESCRIPTION

[0009] Open reading frames (ORFs) encoding new polypeptides, designated GHPO7 (SEQ ID NO: 2), GHPO8 (SEQ ID NO: 4), GHPO9 (SEQ ID NO: 6), GHPO10 (SEQ ID NO: 8), GHPO12 (SEQ ID NO: 10), GHPO25 (SEQ ID NO: 12), GHPO27 (SEQ ID NO: 14), GHPO29 (SEQ ID NO: 16), GHPO30 (SEQ ID NO: 18), GHPO37 (SEQ ID NO: 20), GHPO49 (SEQ ID NO: 22), GHPO51 (SEQ ID NO: 24), GHPO54 (SEQ ID NO: 26), GHPO65 (SEQ ED NO: 28), GHPO66 (SEQ ID NO: 30), GHPO68 (SEQ ID NO: 32), GHPO07 (SEQ ID NO: 34), GHPO77 (SEQ ID NO: 36), GHPO83 (SEQ ID NO: 38), GHPO85 (SEQ ID NO: 40), GHPO87 (SEQ ID NO: 42), GHPO09 (SEQ ID NO: 44), GHPO92 (SEQ ID NO: 46), GHPO96 (SEQ ID NO: 48), GHPO97 (SEQ ID NO: 50), GHPO111 (SEQ ID NO: 52), GHPO115 (SEQ ID NO: 54), GHPO117 (SEQ ID NO: 56), GHPO123 (SEQ ID NO: 58), GHPO124 (SEQ ID NO: 60), GHPO126 (SEQ ID NO: 62), GHPO127 (SEQ ID NO: 64), GHPO128 (SEQ ID NO: 66), GHPO131 (SEQ ID NO: 68), GHPO033 (SEQ ID NO: 70), GHPO014 (SEQ ID NO: 72), GHPO014 (SEQ ID NO: 74), GHPO045 (SEQ ID NO: 76), GHPO047 (SEQ ID NO: 78), GHPO066 (SEQ ID NO: 80), GHPO181 (SEQ ID NO: 82), GHPO187 (SEQ ID NO: 84), GHPO188 (SEQ ID NO: 86), GHPO192 (SEQ ID NO: 88), GHPO202 (SEQ ID NO: 90), GHPO204 (SEQ ID NO: 92), GHPO205 (SEQ ID NO: 94), GHPO212 (SEQ ID NO: 96), GHPO218 (SEQ ID NO: 98), GHPO226 (SEQ ID NO: 100), GHPO231 (SEQ ID NO: 102), GHPO236 (SEQ ID NO: 104), GHPO239 (SEQ ID NO: 106), GHPO245 (SEQ ID NO: 108), GHPO246 (SEQ ID NO: 110), GHPO248 (SEQ ID NO: 112), GHPO253 (SEQ ID NO: 114), GHPO265 (SEQ ID NO: 116), GHPO266 (SEQ ID NO: 118), GHPO271 (SEQ ID NO: 120), GHPO272 (SEQ ID NO: 122), GHPO286 (SEQ ID NO: 124), GHPO291 (SEQ ID NO: 126), GHPO292 (SEQ ID NO: 128), GHPO297 (SEQ ID NO: 130), GHPO304 (SEQ ID NO: 132), GHPO307 (SEQ ID NO: 134), GHPO324 (SEQ ID NO: 136), GHPO326 (SEQ ID NO: 138), GHPO331 (SEQ ID NO: 140), GHPO343 (SEQ ID NO: 142), GHPO345 (SEQ ID NO: 144), GHPO346 (SEQ ID NO: 146), GHPO352 (SEQ ID NO: 148), GHPO355 (SEQ ID NO: 150), GHPO363 (SEQ ID NO: 152), GHPO369 (SEQ ID NO: 154), GHPO376 (SEQ ID NO: 156), GHPO378 (SEQ ID NO: 158), GHPO388 (SEQ ID NO: 160), GHPO396 (SEQ ID NO: 162), GHPO403 (SEQ ID NO: 164), GHPO410 (SEQ ID NO: 166), GHPO415 (SEQ ID NO: 168), GHPO421 (SEQ ID NO: 170), GHPO439 (SEQ ID NO: 172), GHPO441 (SEQ ID NO: 174), GHPO443 (SEQ ID NO: 176), GHPO453 (SEQ ID NO: 178), GHPO455 (SEQ ID NO: 180), GHPO464 (SEQ ID NO: 182), GHPO467 (SEQ ID NO: 184), GHPO468 (SEQ ID NO: 186), GHPO470 (SEQ ID NO: 188), GHPO486 (SEQ ID NO: 190), GHPO487 (SEQ ID NO: 192), GHPO488 (SEQ ID NO: 194), GHPO489 (SEQ ID NO: 196), GHPO498 (SEQ ID NO: 198), GHPO501 (SEQ ID NO: 200), GHPO504 (SEQ ID NO: 202), GHPO512 (SEQ ID NO: 204), GHPO517 (SEQ ID NO: 206), GHPO520 (SEQ ID NO: 208), GHPO528 (SEQ ID NO: 210), GHPO530 (SEQ ID NO: 212), GHPO532 (SEQ ID NO: 214), GHPO548 (SEQ ID NO: 216), GHPO561 (SEQ ID NO: 218), GHPO564 (SEQ ID NO: 220), GHPO572 (SEQ ID NO: 222), GHPO573 (SEQ ID NO: 224), GHPO574 (SEQ ID NO: 226), GHPO577 (SEQ ID NO: 228), GHPO579 (SEQ ID NO: 230), GHPO583 (SEQ ID NO: 232), GHPO588 (SEQ ID NO: 234), GHPO593 (SEQ ID NO: 236), GHPO597 (SEQ ID NO: 238), GHPO598 (SEQ ID NO: 240), GHPO604 (SEQ ID NO: 242), GHPO606 (SEQ ID NO: 244), GHPO611 (SEQ ID NO: 246), GHPO612 (SEQ ID NO: 248), GHPO615 (SEQ ID NO: 250), GHPO632 (SEQ ID NO: 252), GHPO633 (SEQ ID NO: 254), GHPO637 (SEQ ID NO: 256), GHPO651 (SEQ ID NO: 258), GHPO663 (SEQ ID NO: 260), GHPO686 (SEQ ID NO: 262), GHPO693 (SEQ ID NO: 264), GHPO698 (SEQ ID NO: 266), GHPO703 (SEQ ID NO: 268), GHPO704 (SEQ ID NO: 270), GHPO705 (SEQ ID NO: 272), GHPO707 (SEQ ID NO: 274), GHPO721 (SEQ ID NO: 276), GHPO727 (SEQ ID NO: 278), GHPO728 (SEQ ID NO: 280), GHPO733 (SEQ ID NO: 282), GHPO758 (SEQ ID NO: 284), GHPO763 (SEQ ID NO: 286), GHPO771 (SEQ ID NO: 288), GHPO774 (SEQ ID NO: 290), GHPO776 (SEQ ID NO: 292), GHPO783 (SEQ ID NO: 294), GHPO800 (SEQ ID NO: 296), GHPO806 (SEQ ID NO: 298), GHPO807 (SEQ ID NO: 300), GHPO808 (SEQ ID NO: 302), GHPO809 (SEQ ID NO: 304), GHPO811 (SEQ ID NO: 306), GHPO815 (SEQ ID NO: 308), GHPO819 (SEQ ID NO: 310), GHPO841 (SEQ ID NO: 312), GHPO843 (SEQ ID NO: 314), GHPO846 (SEQ ID NO: 316), GHPO875 (SEQ ID NO: 318), GHPO892 (SEQ ID NO: 320), GHPO902 (SEQ ID NO: 322), GHPO904 (SEQ ID NO: 324), GHPO906 (SEQ ID NO: 326), GHPO908 (SEQ ID NO: 328), GHPO921 (SEQ ID NO: 330), GHPO923 (SEQ ID NO: 332), GHPO926 (SEQ ID NO: 334), GHPO933 (SEQ ID NO: 336), GHPO939 (SEQ ID NO: 338), GHPO940 (SEQ ID NO: 340), GHPO943 (SEQ ID NO: 342), GHPO951 (SEQ ID NO: 344), GHPO961 (SEQ ID NO: 346), GHPO965 (SEQ ID NO: 348), GHPO990 (SEQ ID NO: 350), GHPO991 (SEQ ID NO: 352), GHPO998 (SEQ ID NO: 354), GHPO1001 (SEQ ID NO: 356), GHPO1005 (SEQ ID NO: 358), GHPO1033 (SEQ ID NO: 360), GHPO1039 (SEQ ID NO: 362), GHPO1041 (SEQ ID NO: 364), GHPO1043 (SEQ ID NO: 366), GHPO1044 (SEQ ID NO: 368), GHPO1051 (SEQ ID NO: 370), GHPO1058 (SEQ ID NO: 372), GHPO1060 (SEQ ID NO: 374), GHPO1075 (SEQ ID NO: 376), GHPO1077 (SEQ ID NO: 378), GHPO1082 (SEQ ID NO: 380), GHPO1083 (SEQ ID NO: 382), GHPO1086 (SEQ ID NO: 384), GHPO1087 (SEQ ID NO: 386), GHPO1090 (SEQ ID NO: 388), GHPO1097 (SEQ ID NO: 390), GHPO1098 (SEQ ID NO: 392), GHPO1103 (SEQ ID NO: 394), GHPO1113 (SEQ ID NO: 396), GHPO1116 (SEQ ID NO: 398), GHPO1123 (SEQ ID NO: 400), GHPO1125 (SEQ ID NO: 402), GHPO1129 (SEQ ID NO: 404), GHPO1130 (SEQ ID NO: 406), GHPO1134 (SEQ ID NO: 408), GHPO1161 (SEQ ID NO: 410), GHPO1166 (SEQ ID NO: 412), GHPO1170 (SEQ ID NO: 414), GHPO1175 (SEQ ID NO: 416), GHPO1181 (SEQ ID NO: 418), GHPO1186 (SEQ ID NO: 420), GHPO1188 (SEQ ID NO: 422), GHPO1191 (SEQ ID NO: 424), GHPO1193 (SEQ ID NO: 426), GHPO1196 (SEQ ID NO: 428), GHPO1204 (SEQ ID NO: 430), GHPO1210 (SEQ ID NO: 432), GHPO1211 (SEQ ID NO: 434), GHPO1216 (SEQ ID NO: 436), GHPO1218 (SEQ ID NO: 438), GHPO1220 (SEQ ID NO: 440), GHPO1223 (SEQ ID NO: 442), GHPO1226 (SEQ ID NO: 444), GHPO1240 (SEQ ID NO: 446), GHPO1246 (SEQ ID NO: 448), GHPO1251 (SEQ ID NO: 450), GHPO1252 (SEQ ID NO: 452), GHPO1261 (SEQ ID NO: 454), GHPO1265 (SEQ ID NO: 456), GHPO1267 (SEQ ID NO: 458), GHPO1278 (SEQ ID NO: 460), GHPO1282 (SEQ ID NO: 462), GHPO1283 (SEQ ID NO: 464), GHPO1287 (SEQ ID NO: 466), GHPO1292 (SEQ ID NO: 468), GHPO1293 (SEQ ID NO: 470), GHPO1302 (SEQ ID NO: 472), GHPO1309 (SEQ ID NO: 474), GHPO1317 (SEQ ID NO: 476), GHPO1318 (SEQ ID NO: 478), GHPO1321 (SEQ ID NO: 480), GHPO1325 (SEQ ID NO: 482), GHPO1341 (SEQ ID NO: 484), GHPO1351 (SEQ ID NO: 486), GHPO1354 (SEQ ID NO: 488), GHPO1363 (SEQ ID NO: 490), GHPO1371 (SEQ ID NO: 492), GHPO1381 (SEQ ID NO: 494), GHPO1401 (SEQ ID NO: 496), GHPO1402 (SEQ ID NO: 498), GHPO1403 (SEQ ID NO: 500), GHPO1408 (SEQ ID NO: 502), GHPO1416 (SEQ ID NO: 504), GHPO1420 (SEQ ID NO: 506), GHPO1428 (SEQ ID NO: 508), GHPO1437 (SEQ ID NO: 510), GHPO1439 (SEQ ID NO: 512), GHPO1460 (SEQ ID NO: 514), GHPO1463 (SEQ ID NO: 516), GHPO1472 (SEQ ID NO: 518), GHPO1474 (SEQ ID NO: 520), GHPO1484 (SEQ ID NO: 522), GHPO1489 (SEQ ID NO: 524), GHPO1494 (SEQ ID NO: 526), GHPO1495 (SEQ ID NO: 528), GHPO1498 (SEQ ID NO: 530), GHPO1499 (SEQ ID NO: 532), GHPO1500 (SEQ ID NO: 534), GHPO1503 (SEQ ID NO: 536), GHPO1504 (SEQ ID NO: 538), GHPO1510 (SEQ ID NO: 540), GHPO1518 (SEQ ID NO: 542), GHPO1533 (SEQ ID NO: 544), GHPO1541 (SEQ ID NO: 546), GHPO1544 (SEQ ID NO: 548), GHPO1548 (SEQ ID NO: 550), GHPO1565 (SEQ ID NO: 552), GHPO1575 (SEQ ID NO: 554), GHPO1582 (SEQ ID NO: 556), GHPO1595 (SEQ ID NO: 558), GHPO1597 (SEQ ID NO: 560), GHPO1599 (SEQ ID NO: 562), GHPO1601 (SEQ ID NO: 564), GHPO1609 (SEQ ID NO: 566), GHPO1613 (SEQ ID NO: 568), GHPO1614 (SEQ ID NO: 570), GHPO1626 (SEQ ID NO: 572), GHPO1628 (SEQ ID NO: 574), GHPO1639 (SEQ ID NO: 576), GHPO1640 (SEQ ID NO: 578), GHPO1641 (SEQ ID NO: 580), GHPO1646 (SEQ ID NO: 582), GHPO1662 (SEQ ID NO: 584), GHPO1667 (SEQ ID NO: 586), GHPO1668 (SEQ ID NO: 588), GHPO1670 (SEQ ID NO: 590), GHPO1671 (SEQ ID NO: 592), GHPO1672 (SEQ ID NO: 594), GHPO1678 (SEQ ID NO: 596), GHPO1684 (SEQ ID NO: 598), GHPO1695 (SEQ ID NO: 600), GHPO1697 (SEQ ID NO: 602), GHPO1701 (SEQ ID NO: 604), GHPO1719 (SEQ ID NO: 606), GHPO1723 (SEQ ID NO: 608), GHPO1732 (SEQ ID NO: 610), GHPO1739 (SEQ ID NO: 612), GHPO1741 (SEQ ID NO: 614), GHPO1747 (SEQ ID NO: 616), GHPO1749 (SEQ ID NO: 618), GHPO1750 (SEQ ID NO: 620), GHPO1751 (SEQ ID NO: 622), GHPO1755 (SEQ ID NO: 624), GHPO1771 (SEQ ID NO: 626), GHPO1786 (SEQ ID NO: 628), and GHPO1789 (SEQ ID NO: 630), have been identified in the H. pylori genome. These polypeptides can be used, for example, in vaccination methods for preventing or treating Helicobacter infection. Some of the new polypeptides are secreted polypeptides that can be produced in their mature forms (i.e., as polypeptides that have been exported through class II or class III secretion pathways) or as precursors that include signal peptides, which can be removed in the course of excretion/secretion by cleavage at the N-terminal end of the mature form. (The cleavage site is located at the C-terminal end of the signal peptide, adjacent to the mature form.)

[0010] According to a first aspect of the invention, there are provided isolated polynucleotides that encode the precursor and mature forms of the Helicobacter GHPO proteins listed above. Examples of such polynucleotides are those encoding GHPO7 (SEQ ID NO: 1), GHPO8 (SEQ ID NO: 3), GHPO9 (SEQ ID NO: 5), GHPO10 (SEQ ID NO: 7), GHPO12 (SEQ ID NO: 9), GHPO25 (SEQ ID NO: 11), GHPO27 (SEQ ID NO: 13), GHPO29 (SEQ ID NO: 15), GHPO30 (SEQ ID NO: 17), GHPO37 (SEQ ID NO: 19), GHPO49 (SEQ ID NO: 21), GHPO51 (SEQ ID NO: 23), GHPO54 (SEQ ID NO: 25), GHPO65 (SEQ ID NO: 27), GHPO66 (SEQ ID NO: 29), GHPO68 (SEQ ID NO: 31), GHPO70 (SEQ ID NO: 33), GHPO77 (SEQ ID NO: 35), GHPO83 (SEQ ID NO: 37), GHPO85 (SEQ ID NO: 39), GHPO87 (SEQ ID NO: 41), GHPO91 (SEQ ID NO: 43), GHPO92 (SEQ ID NO: 45), GHPO96 (SEQ ID NO: 47), GHPO97 (SEQ ID NO: 49), GHPO111 (SEQ ID NO: 51), GHPO115 (SEQ ID NO: 53), GHPO117 (SEQ ID NO: 55), GHPO123 (SEQ ID NO: 57), GHPO124 (SEQ ID NO: 59), GHPO126 (SEQ ID NO: 61), GHPO127 (SEQ ID NO: 63), GHPO128 (SEQ ID NO: 65), GHPO131 (SEQ ID NO: 67), GHPO133 (SEQ ID NO: 69), GHPO140 (SEQ ID NO: 71), GHPO141 (SEQ ID NO: 73), GHPO145 (SEQ ID NO: 75), GHPO147 (SEQ ID NO: 77), GHPO166 (SEQ ID NO: 79), GHPO181 (SEQ ID NO: 81), GHPO187 (SEQ ID NO: 83), GHPO188 (SEQ ID NO: 85), GHPO192 (SEQ ID NO: 87), GHPO202 (SEQ ID NO: 89), GHPO204 (SEQ ID NO: 91), GHPO205 (SEQ ID NO: 93), GHPO212 (SEQ ID NO: 95), GHPO218 (SEQ ID NO: 97), GHPO226 (SEQ ID NO: 99), GHPO231 (SEQ ID NO:l01), GHPO236 (SEQ ID NO: 103), GHPO239 (SEQ ID NO: 105), GHPO245 (SEQ ID NO: 107), GHPO246 (SEQ ID NO: 109), GHPO248 (SEQ ID NO: 111), GHPO253 (SEQ ID NO: 113), GHPO265 (SEQ ID NO: 115), GHPO266 (SEQ ID NO: 117), GHPO271 (SEQ ID NO: 119), GHPO272 (SEQ ID NO: 121), GHPO286 (SEQ ID NO: 123), GHPO291 (SEQ ID NO: 125), GHPO292 (SEQ ID NO: 127), GHPO297 (SEQ ID NO: 129), GHPO304 (SEQ ID NO: 131), GHPO307 (SEQ ID NO: 133), GHPO324 (SEQ ID NO: 135), GHPO326 (SEQ ID NO: 137), GHPO331 (SEQ ID NO: 139), GHPO343 (SEQ ID NO: 141), GHPO345 (SEQ ID NO: 143), GHPO346 (SEQ ID NO: 145), GHPO0352 (SEQ ID NO: 147), GHPO355 (SEQ ID NO: 149), GHPO363 (SEQ ID NO: 151), GHPO369 (SEQ ID NO: 153), GHPO376 (SEQ ID NO: 155), GHPO378 (SEQ ID NO: 157), GHPO388 (SEQ ID NO: 159), GHPO396 (SEQ ID NO: 161), GHPO403 (SEQ ID NO: 163), GHPO410 (SEQ ID NO: 165), GHPO415 (SEQ ID NO: 167), GHPO421 (SEQ ID NO: 169), GHPO439 (SEQ ID NO: 171), GHPO441 (SEQ ID NO: 173), GHPO443 (SEQ ID NO: 175), GHPO453 (SEQ ID NO: 177), GHPO455 (SEQ ID NO: 179), GHPO464 (SEQ ID NO: 181), GHPO467 (SEQ ID NO: 183), GHPO468 (SEQ ID NO: 185), GHPO470 (SEQ ID NO: 187), GHPO486 (SEQ ID NO: 189), GHPO487 (SEQ ID NO: 191), GHPO488 (SEQ ID NO: 193), GHPO489 (SEQ ID NO: 195), GHPO498 (SEQ ID NO: 197), GHPO501 (SEQ ID NO: 199), GHPO504 (SEQ ID NO: 201), GHPO512 (SEQ ID NO: 203), GHPO517 (SEQ ID NO: 205), GHPO520 (SEQ ID NO: 207), GHPO528 (SEQ ID NO: 209), GHPO530 (SEQ ID NO: 211), GHPO532 (SEQ ID NO: 213), GHPO548 (SEQ ID NO: 215), GHPO561 (SEQ ID NO: 217), GHPO564 (SEQ ID NO: 219), GHPO572 (SEQ ID NO: 221), GHPO573 (SEQ ID NO: 223), GHPO574 (SEQ ID NO: 225), GHPO577 (SEQ ID NO: 227), GHPO579 (SEQ ID NO: 229), GHPO583 (SEQ ID NO: 231), GHPO588 (SEQ ID NO: 233), GHPO593 (SEQ ID NO: 235), GHPO597 (SEQ ID NO: 237), GHPO598 (SEQ ID NO: 239), GHPO604 (SEQ ID NO: 241), GHPO606 (SEQ ID NO: 243), GHPO611 (SEQ ID NO: 245), GHPO612 (SEQ ID NO: 247), GHPO615 (SEQ ID NO: 249), GHPO632 (SEQ ID NO: 251), GHPO633 (SEQ ID NO: 253), GHPO637 (SEQ ID NO: 255), GHPO651 (SEQ ID NO: 257), GHPO663 (SEQ ID NO: 259), GHPO686 (SEQ ID NO: 261), GHPO693 (SEQ ID NO: 263), GHPO698 (SEQ ID NO: 265), GHPO703 (SEQ ID NO: 267), GHPO704 (SEQ ID NO: 269), GHPO705 (SEQ ID NO: 271), GHPO707 (SEQ ID NO: 273), GHPO721 (SEQ ID NO: 275), GHPO727 (SEQ ID NO: 277), GHPO728 (SEQ ID NO: 279), GHPO733 (SEQ ID NO: 281), GHPO758 (SEQ ID NO: 283), GHPO763 (SEQ ID NO: 285), GHPO771 (SEQ ID NO: 287), GHPO774 (SEQ ID NO: 289), GHPO776 (SEQ ID NO: 291), GHPO783 (SEQ ID NO: 293), GHPO800 (SEQ ID NO: 295), GHPO806 (SEQ ID NO: 297), GHPO807 (SEQ ID NO: 299), GHPO808 (SEQ ID NO: 301), GHPO809 (SEQ ID NO: 303), GHPO811 (SEQ ID NO: 305), GHPO815 (SEQ ID NO: 307), GHPO819 (SEQ ID NO: 309), GHPO841 (SEQ ID NO: 311), GHPO843 (SEQ ID NO: 313), GHPO846 (SEQ ID NO: 315), GHPO875 (SEQ ID NO: 317), GHPO892 (SEQ ID NO: 319), GHPO902 (SEQ ID NO: 321), GHPO904 (SEQ ID NO: 323), GHPO906 (SEQ ID NO: 325), GHPO908 (SEQ ID NO: 327), GHPO921 (SEQ ID NO: 329), GHPO923 (SEQ ID NO: 331), GHPO926 (SEQ ID NO: 333), GHPO933 (SEQ ID NO: 335), GHPO939 (SEQ ID NO: 337), GHPO940 (SEQ ID NO: 339), GHPO943 (SEQ ID NO: 341), GHPO951 (SEQ ID NO: 343), GHPO961 (SEQ ID NO: 345), GHPO965 (SEQ ID NO: 347), GHPO990 (SEQ ID NO: 349), GHPO991 (SEQ ID NO: 351), GHPO998 (SEQ ID NO: 353), GHPO1001 (SEQ ID NO: 355), GHPO1005 (SEQ ID NO: 357), GHPO1033 (SEQ ID NO: 359), GHPO1039 (SEQ ID NO: 361), GHPO1041 (SEQ ID NO: 363), GHPO1043 (SEQ ID NO: 365), GHPO1044 (SEQ ID NO: 367), GHPO1051 (SEQ ID NO: 369), GHPO1058 (SEQ ID NO: 371), GHPO1060 (SEQ ID NO: 373), GHPO1075 (SEQ ID NO: 375), GHPO1077 (SEQ ID NO: 377), GHPO1082 (SEQ ID NO: 379), GHPO1083 (SEQ ID NO: 381), GHPO1086 (SEQ ID NO: 383), GHPO1087 (SEQ ID NO: 385), GHPO1090 (SEQ ID NO: 387), GHPO1097 (SEQ ID NO: 389), GHPO1098 (SEQ ID NO: 391), GHPO1103 (SEQ ID NO: 393), GHPO1113 (SEQ ID NO: 395), GHPO1116 (SEQ ID NO: 397), GHPO1123 (SEQ ID NO: 399), GHPO1125 (SEQ ID NO: 401), GHPO1129 (SEQ ID NO: 403), GHPO1130 (SEQ ID NO: 405), GHPO1134 (SEQ ID NO: 407), GHPO1161 (SEQ ID NO: 409), GHPO1166 (SEQ ID NO: 411), GHPO1170 (SEQ ID NO: 413), GHPO1175 (SEQ ID NO: 415), GHPO1181 (SEQ ID NO: 417), GHPO1186 (SEQ ID NO: 419), GHPO1188 (SEQ ID NO: 421), GHPO1191 (SEQ ID NO: 423), GHPO1193 (SEQ ID NO: 425), GHPO1196 (SEQ ID NO: 427), GHPO1204 (SEQ ID NO: 429), GHPO1210 (SEQ ID NO: 431), GHPO1211 (SEQ ID NO: 433), GHPO1216 (SEQ ID NO: 435), GHPO1218 (SEQ ID NO: 437), GHPO1220 (SEQ ID NO: 439), GHPO1223 (SEQ ID NO: 441), GHPO1226 (SEQ ID NO: 443), GHPO1240 (SEQ ID NO: 445), GHPO1246 (SEQ ID NO: 447), GHPO)1251 (SEQ ID NO: 449), GHPO1252 (SEQ ID NO: 451), GHPO1261 (SEQ ID NO: 453), GHPO1265 (SEQ ID NO: 455), GHPO1267 (SEQ ID NO: 457), GHPO1278 (SEQ ID NO: 459), GHPO1282 (SEQ ID NO: 461), GHPO1283 (SEQ ID NO: 463), GHPO1287 (SEQ ID NO: 465), GHPO1292 (SEQ ID NO: 467), GHPO1293 (SEQ ID NO: 469), GHPO1302 (SEQ ID NO: 471), GHPO1309 (SEQ ID NO: 473), GHPO1317 (SEQ ID NO: 475), GHPO1318 (SEQ ID NO: 477), GHPO1321 (SEQ ID NO: 479), GHPO1325 (SEQ ID NO: 481), GHPO1341 (SEQ ID NO: 483), GHPO1351 (SEQ ID NO: 485), GHPO1354 (SEQ ID NO: 487), GHPO1363 (SEQ ID NO: 489), GHPO1371 (SEQ ID NO: 491), GHPO1381 (SEQ ID NO: 493), GHPO1401 (SEQ ID NO: 495), GHPO1402 (SEQ ID NO: 497), GHPO1403 (SEQ ID NO: 499), GHPO1408 (SEQ ID NO: 501), GHPO1416 (SEQ ID NO: 503), GHPO1420 (SEQ ID NO: 505), GHPO1428 (SEQ ID NO: 507), GHPO1437 (SEQ ID NO: 509), GHPO1439 (SEQ ID NO: 511), GHPO1460 (SEQ ID NO: 513), GHPO1463 (SEQ ID NO: 515), GHPO1472 (SEQ ID NO: 517), GHPO1474 (SEQ ID NO: 519), GHPO1484 (SEQ ID NO: 521), GHPO1489 (SEQ ID NO: 523), GHPO1494 (SEQ ID NO: 525), GHPO1495 (SEQ ID NO: 527), GHPO1498 (SEQ ID NO: 529), GHPO1499 (SEQ ID NO: 531), GHPO1500 (SEQ ID NO: 533), GHPO1503 (SEQ ID NO: 535), GHPO1504 (SEQ ID NO: 537), GHPO1510 (SEQ ID NO: 539), GHPO1518 (SEQ ID NO: 541), GHPO1533 (SEQ ID NO: 543), GHPO1541 (SEQ ID NO: 545), GHPO1544 (SEQ ID NO: 547), GHPO1548 (SEQ ID NO: 549), GHPO1565 (SEQ ID NO: 551), GHPO1575 (SEQ ID NO: 553), GHPO1582 (SEQ ID NO: 555), GHPO1595 (SEQ ID NO: 557), GHPO1597 (SEQ ID NO: 559), GHPO1599 (SEQ ID NO: 561), GHPO1601 (SEQ ID NO: 563), GHPO1609 (SEQ ID NO: 565), GHPO1613 (SEQ ID NO: 567), GHPO1614 (SEQ ID NO: 569), GHPO1626 (SEQ ID NO: 571), GHPO1628 (SEQ ID NO: 573), GHPO1639 (SEQ ID NO: 575), GHPO1640 (SEQ ID NO: 577), GHPO1641 (SEQ ID NO: 579), GHPO1646 (SEQ ID NO: 581), GHPO1662 (SEQ ID NO: 583), GHPO1667 (SEQ ID NO: 585), GHPO1668 (SEQ ID NO: 587), GHPO1670 (SEQ ID NO: 589), GHPO1671 (SEQ ID NO: 591), GHPO1672 (SEQ ID NO: 593), GHPO1678 (SEQ ID NO: 595), GHPO1684 (SEQ ID NO: 597), GHPO1695 (SEQ ID NO: 599), GHPO1697 (SEQ ID NO: 601), GHPO1701 (SEQ ID NO: 603), GHPO1719 (SEQ ID NO: 605), GHPO1723 (SEQ ID NO: 607), GHPO732 (SEQ ID NO: 609), GHPO1739 (SEQ ID NO: 611), GHPO1741 (SEQ ID NO: 613), GHPO1747 (SEQ ID NO: 615), GHPO1749 (SEQ ID NO: 617), GHPO1750 (SEQ ID NO: 619), GHPO1751 (SEQ ID NO: 621), GHPO1755 (SEQ ID NO: 623), GHPO1771 (SEQ ID NO: 625), GHPO1786 (SEQ ID NO: 627), and GHPO1789 (SEQ ID NO: 629).

[0011] An isolated polynucleotide of the invention encodes (i) a polypeptide having an amino acid sequence that is homologous to a Helicobacter amino acid sequence of a polypeptide, the Helicobacter amino acid sequence being selected from the group consisting of the amino acid sequences shown in the sequence listing (even numbers, up to SEQ ID NO: 630), or (ii) a derivative of the polypeptide.

[0012] In addition to the fuill-length polypeptides encoded by the polynucleotides of the invention, as set forth above, polynucleotides included in the invention can also encode polypeptides that lack signal sequences, as well as other polypeptide or peptide fragments of the full-length polypeptides.

[0013] The term “isolated polynucleotide” is defined as a polynucleotide that is removed from the environment in which it naturally occurs. For example, a naturally-occurring DNA molecule present in the genome of a living bacteria or as part of a gene bank is not isolated, but the same molecule, separated from the remaining part of the bacterial genome, as a result of, e.g., a cloning event (amplification), is “isolated.” Typically, an isolated DNA molecule is free from DNA regions (e.g., coding regions) with which it is immediately contiguous, at the 5′ or 3′ ends, in the naturally occurring genome. Such isolated polynucleotides can be part of a vector or a composition and still be isolated, as such a vector or composition is not part of its natural environment.

[0014] A polynucleotide of the invention can consist of RNA or DNA (e.g., cDNA, genomic DNA, or synthetic DNA), or modifications or combinations of RNA or DNA. The polynucleotide can be double-stranded or single-stranded and, if single-stranded, can be the coding (sense) strand or the non-coding (anti-sense) strand. The sequences that encode polypeptides of the invention, as shown in the sequence listing (even numbers, up to SEQ ID NO: 630), can be (a) the coding sequence as shown in any of the nucleotide sequences of the sequence listing (odd numbers, up to SEQ ID NO: 629); (b) a ribonucleotide sequence derived by transcription of (a); or (c) a different coding sequence that, as a result of the redundancy or degeneracy of the genetic code, encodes the same polypeptides as the polynucleotide molecules having the sequences illustrated in any of the nucleotide sequences of the sequence listing (odd numbers, up to SEQ ID NO: 629). The polypeptide can be one that is naturally secreted or excreted by, e.g., H. felis, H. mustelae, H. heilmanii, or H. pylori.

[0015] By “polypeptide” or “protein” is meant any chain of amino acids, regardless of length or post-translational modification (e.g., glycosylation or phosphorylation). Both terms are used interchangeably in the present application.

[0016] By “homologous amino acid sequence” is meant an amino acid sequence that differs from an amino acid sequence shown in the sequence listing (even numbers, up to SEQ ID NO: 630), or an amino acid sequence encoded by a nucleotide sequence shown in the sequence listing (odd numbers, up to SEQ ID NO: 629), by one or more non-conservative amino acid substitutions, deletions, or additions located at positions at which they do not destroy the specific antigenicity of the polypeptide. Preferably, such a sequence is at least 75%, more preferably at least 80%, and most preferably at least 90% identical to an amino acid sequence shown in the sequence listing (even numbers, up to SEQ ID NO: 630). Homologous amino acid sequences include sequences that are identical or substantially identical to an amino acid sequence as shown in the sequence listing (even numbers, up to SEQ ID NO: 630). By “amino acid sequence that is substantially identical” is meant a sequence that is at least 90%, preferably at least 95%, more preferably at least 97%, and most preferably at least 99% identical to an amino acid sequence of reference and that differs from the sequence of reference, if at all, by a majority of conservative amino acid substitutions.

[0017] Conservative amino acid substitutions typically include substitutions among amino acids of the same class. These classes include, for example, amino acids having uncharged polar side chains, such as asparagine, glutamine, serine, threonine, and tyrosine; amino acids having basic side chains, such as lysine, arginine, and histidine; amino acids having acidic side chains, such as aspartic acid and glutamic acid; and amino acids having nonpolar side chains, such as glycine, alanine, valine, leucine, isoleucine, proline, phenylalanine, methionine, tryptophan, and cysteine.

[0018] Homology can be measured using sequence analysis software (e.g., Sequence Analysis Software Package of the Genetics Computer Group, University of Wisconsin Biotechnology Center, 1710 University Avenue, Madison, Wis. 53705). Similar amino acid sequences are aligned to obtain the maximum degree of homology (i.e., identity). To this end, it may be necessary to artificially introduce gaps into the sequence. Once the optimal alignment has been set up, the degree of homology (i.e., identity) is established by recording all of the positions in which the amino acids of both sequences are identical, relative to the total number of positions.

[0019] Homologous polynucleotide sequences are defined in a similar way. Preferably, a homologous sequence is one that is at least 45%, more preferably at least 60%, and most preferably at least 85% identical to a coding sequence of any of the nucleotide sequences set forth in the sequence listing (odd numbers, up to SEQ ID NO: 629).

[0020] Polypeptides having a sequence homologous to any one of the sequences shown in the sequence listing (even numbers, up to SEQ ID NO: 630), include naturally-occurring allelic variants, as well as mutants or any other non-naturally occurring variants that are analogous in terms of antigenicity, to a polypeptide having a sequence as shown in the sequence listing (even numbers, up to SEQ ID NO: 630).

[0021] As is known in the art, an allelic variant is an alternate form of a polypeptide that is characterized as having a substitution, deletion, or addition of one or more amino acids that does not alter the biological function of the polypeptide. By “biological function” is meant a function of the polypeptide in the cells in which it naturally occurs, even if the function is not necessary for the growth or survival of the cells. For example, the biological function of a porin is to allow the entry into cells of compounds present in the extracellular medium. The biological function is distinct from the antigenic function. A polypeptide can have more than one biological function.

[0022] Allelic variants are very common in nature. For example, a bacterial species, e.g., H. pylori, is usually represented by a variety of strains that differ from each other by minor allelic variations. Indeed, a polypeptide that fulfills the same biological function in different strains can have an amino acid sequence that is not identical in each of the strains. Such an allelic variation can be equally reflected at the polynucleotide level.

[0023] Support for the use of allelic variants of polypeptide antigens comes from, e.g., studies of the Helicobacter urease antigen. The amino acid sequence of Helicobacter urease varies widely from species to species, yet cross-species protection occurs, indicating that the urease molecule, when used as an immunogen, is highly tolerant of amino acid variations. Even among different strains of the single species H. pylori, there are amino acid sequence variations.

[0024] For example, although the amino acid sequences of the UreA and UreB subunits of H. pylori and H. felis ureases differ from one another by 26.5% and 11.8%, respectively (Ferrero et al., Molecular Microbiology 9(2):323-333, 1993), it has been shown that H. pylori urease protects mice from H. felis infection (Michetti et al., Gastroenterology 107:1002, 1994). In addition, it has been shown that the individual structural subunits of urease, UreA and UreB, which contain distinct amino acid sequences, are both protective antigens against Helicobacter infection (Michetti et al., supra). Similarly, Cuenca et al. (Gastroenterology 110:1770, 1996) showed that therapeutic immunization of H. mustelae-infected ferrets with H. pylori urease was effective at eradicating H. mustelae infection. Further, several urease variants have been reported to be effective vaccine antigens, including, e.g., recombinant UreA+UreB apoenzyme expressed from pORV142 (UreA and UreB sequences derived from H. pylori strain CPM630; Lee et al., J. Infect. Dis.172:161, 1995); recombinant UreA+UreB apoenzyme expressed from pORV214 (UreA and UreB sequences differ from H. pylori strain CPM630 by one and two amino acid changes, respectively; Lee et al., supra, 1995); a UreA-glutathione-S-transferase fusion protein (UreA sequence from H. pylori strain ATCC 43504; Thomas et al., Acta Gastro-Enterologica Belgica 56:54, 1993); UreA+UreB holoenzyme purified from H. pylori strain NCTC11637 (Marchetti et al., Science 267:1655, 1995); a UreA-MBP fusion protein (UreA from H. pylori strain 85P; Ferrero et al., Infection and Immunity 62:4981, 1994); a UreB-MBP fusion protein (UreB from H. pylori strain 85P; Ferrero et al., supra); a UreA-MBP fusion protein (UreA from H. felis strain ATCC 49179; Ferrero et al., supra); a UreB-MBP fusion protein (UreB from H. felis strain ATCC 49179; Ferrero et al., supra); and a 37 kDa fragment of UreB containing amino acids 220-569 (Dore-Davin et al., “A 37 kD fragment of UreB is sufficient to confer protection against Helicobacter felis infection in mice”). Finally, Thomas et al. (supra) showed that oral immunization of mice with crude sonicates of H. pylori protected mice from subsequent challenge with H. felis.

[0025] Polynucleotides, e.g., DNA molecules, encoding allelic variants can easily be obtained by polymerase chain reaction (PCR) amplification of genomic bacterial DNA extracted by conventional methods. This involves the use of synthetic oligonucleotide primers matching sequences that are upstream and downstream of the 5′ and 3′ ends of the coding region. Suitable primers can be designed based on the nucleotide sequence information provided in the sequence listing (odd numbers, up to SEQ ID NO: 629). Typically, a primer consists of 10 to 40, preferably 15 to 25 nucleotides. It can also be advantageous to select primers containing C and G nucleotides in proportions sufficient to ensure efficient hybridization, e.g., an amount of C and G nucleotides of at least 40%, preferably 50%, of the total nucleotide amount. Those skilled in the art can readily design primers that can be used to isolate the polynucleotides of the invention from different Helicobacter strains. Experimental conditions for carrying out PCR can readily be determined by one skilled in the art and an illustration of carrying out PCR is provided in Example 2. As is well known in the art, restriction endonuclease recognition sites that contain, typically, 4 to 6 nucleotides (for example, the sequences 5′-GGATCC-3′ (BamHI) or 5′-CTCGAG-3′ (XhoI)), can be included on the 5′ ends of the primers. Restriction sites can be selected by those skilled in the art so that the amplified DNA can be conveniently cloned into an appropriately digested vector, such as a plasmid.

[0026] Useful homologs that do not occur naturally can be designed using known methods for identifying regions of an antigen that are likely to be tolerant of amino acid sequence changes and/or deletions. For example, sequences of the antigen from different species can be compared to identify conserved sequences.

[0027] Polypeptide derivatives that are encoded by polynucleotides of the invention include, e.g., fragments, polypeptides having large internal deletions derived from full-length polypeptides, and fusion proteins. Polypeptide fragments of the invention can be derived from a polypeptide having a sequence homologous to any of the sequences of the sequence listing (even numbers, up to SEQ ID NO: 630), to the extent that the fragments retain the substantial antigenicity of the parent polypeptide (specific antigenicity). Polypeptide derivatives can also be constructed by large internal deletions that remove a substantial part of the parent polypeptide, while retaining specific antigenicity. Generally, polypeptide derivatives should be about at least 12 amino acids in length to maintain antigenicity. Advantageously, they can be at least 20 amino acids, preferably at least 50 amino acids, more preferably at least 75 amino acids, and most preferably at least 100 amino acids in length.

[0028] Useful polypeptide derivatives, e.g., polypeptide fragments, can be designed using computer-assisted analysis of amino acid sequences in order to identify sites in protein antigens having potential as surface-exposed, antigenic regions (Hughes et al., Infect. Immun. 60(9):3497, 1992). For example, the Laser Gene Program from DNA Star can be used to obtain hydrophilicity, antigenic index, and intensity index plots for the polypeptides of the invention. This program can also be used to obtain information about homologies of the polypeptides with known protein motifs. One skilled in the art can readily use the information provided in such plots to select peptide fragments for use as vaccine antigens. For example, fragments spanning regions of the plots in which the antigenic index is relatively high can be selected. One can also select fragments spanning regions in which both the antigenic index and the intensity plots are relatively high. Fragments containing conserved sequences, particularly hydrophilic conserved sequences, can also be selected.

[0029] Polypeptide fragments and polypeptides having large internal deletions can be used for revealing epitopes that are otherwise masked in the parent polypeptide and that may be of importance for inducing a protective T cell-dependent immune response. Deletions can also remove immunodominant regions of high variability among strains.

[0030] It is an accepted practice in the field of immunology to use fragments and variants of protein immunogens as vaccines, as all that is required to induce an immune response to a protein is a small (e.g., 8 to 10 amino acids) immunogenic region of the protein. This has been done for a number of vaccines against pathogens other than Helicobacter. For example, short synthetic peptides corresponding to surface-exposed antigens of pathogens such as murine mammary tumor virus (peptide containing 11 amino acids; Dion et al., Virology 179:474-477, 1990), Semliki Forest virus (peptide containing 16 amino acids; Snijders et al., J. Gen. Virol. 72:557-565, 1991), and canine parvovirus (2 overlapping peptides, each containing 15 amino acids; Langeveld et al., Vaccine 12(15):1473-1480, 1994) have been shown to be effective vaccine antigens against their respective pathogens.

[0031] Polynucleotides encoding polypeptide fragments and polypeptides having large internal deletions can be constructed using standard methods (see, e.g., Ausubel et al., Current Protocols in Molecular Biology, John Wiley & Sons Inc., 1994), for example, by PCR, including inverse PCR, by restriction enzyme treatment of the cloned DNA molecules, or by the method of Kunkel et al. (Proc. Natl. Acad. Sci. U.S.A. 82:448, 1985; biological material available at Stratagene).

[0032] A polypeptide derivative can also be produced as a fusion polypeptide that contains a polypeptide or a polypeptide derivative of the invention fused, e.g., at the N- or C-terminal end, to any other polypeptide (hereinafter referred to as a peptide tail). Such a product can be easily obtained by translation of a genetic fusion, i.e., a hybrid gene. Vectors for expressing fusion polypeptides are commercially available, and include the pMal-c2 or pMal-p2 systems of New England Biolabs, in which the peptide tail is a maltose binding protein, the glutathione-S-transferase system of Pharmacia, or the His-Tag system available from Novagen. These and other expression systems provide convenient means for further purification of polypeptides and derivatives of the invention.

[0033] Another particular example of fusion polypeptides included in invention includes a polypeptide or polypeptide derivative of the invention fused to a polypeptide having adjuvant activity, such as, e.g., subunit B of either cholera toxin or E. coli heat-labile toxin. Several possibilities can be used for producing such fusion proteins. First, the polypeptide of the invention can be fused to the N-terminal end or, preferably, to the C-terminal end of the polypeptide having adjuvant activity. Second, a polypeptide fragment of the invention can be fused within the amino acid sequence of the polypeptide having adjuvant activity. Spacer sequences can also be included, if desired.

[0034] As stated above, the polynucleotides of the invention encode Helicobacter polypeptides in precursor or mature form. They can also encode hybrid precursors containing heterologous signal peptides, which can mature into polypeptides of the invention. By “heterologous signal peptide” is meant a signal peptide that is not found in the naturally-occurring precursor of a polypeptide of the invention.

[0035] A polynucleotide of the invention hybridizes, preferably under stringent conditions, to a polynucleotide having a sequence as shown in the sequence listing (odd numbers, up to SEQ ID NO: 629). Hybridization procedures are, e.g., described by Ausubel et al. (supra); Silhavy et al. (Experiments with Gene Fusions, Cold Spring Harbor Laboratory Press, Cold Spring Harbor, N.Y., 1984); and Davis et al. (A Manual for Genetic Engineering: Advanced Bacterial Genetics, Cold Spring Harbor Laboratory Press, Cold Spring Harbor, N.Y., 1980). Important parameters that can be considered for optimizing hybridization conditions are reflected in the following formula, which facilitates calculation of the melting temperature (Tm), which is the temperature above which two complementary DNA strands separate from one another (Casey et al., Nucl. Acid Res. 4:1539, 1977): Tm=81.5+0.5×(% G+C)+1.6 log (positive ion concentration)−0.6×(% formamide). Under appropriate stringency conditions, hybridization temperature (Th) is approximately 20 to 40° C., 20 to 25° C., or, preferably, 30 to 40° C. below the calculated Tm. Those skilled in the art will understand that optimal temperature and salt conditions can be readily determined empirically in preliminary experiments using conventional procedures. For example, stringent conditions can be achieved, both for pre-hybridizing and hybridizing incubations, (i) within 4-16 hours at 42° C., in 6×SSC containing 50% formamide or (ii) within 4-16 hours at 65° C. in an aqueous 6×SSC solution (1 M NaCl, 0.1 M sodium citrate (pH 7.0)). For polynucleotides containing 30 to 600 nucleotides, the above formula is used and then is corrected by subtracting (600/polynucleotide size in base pairs). Stringency conditions are defined by a Th that is 5 to 10° C. below Tm.

[0036] Hybridization conditions with oligonucleotides shorter than 20-30 bases do not precisely follow the rules set forth above. In such cases, the formula for calculating the Tm is as follows: Tm=4×(G+C)+2(A+T). For example, an 18 nucleotide fragment of 50% G+C would have an approximate Tm of 54° C.

[0037] A polynucleotide molecule of the invention, containing RNA, DNA, or modifications or combinations thereof, can have various applications. For example, a polynucleotide molecule can be used (i) in a process for producing the encoded polypeptide in a recombinant host system, (ii) in the construction of vaccine vectors such as poxviruses, which are further used in methods and compositions for preventing and/or treating Helicobacter infection, (iii) as a vaccine agent, in a naked form or formulated with a delivery vehicle and, (iv) in the construction of attenuated Helicobacter strains that can over-express a polynucleotide of the invention or express it in a non-toxic, mutated form.

[0038] According to a second aspect of the invention, there is therefore provided (i) an expression cassette containing a polynucleotide molecule of the invention placed under the control of elements (e.g., a promoter) required for expression; (ii) an expression vector containing an expression cassette of the invention; (iii) a procaryotic or eucaryotic cell transformed or transfected with an expression cassette and/or vector of the invention, as well as (iv) a process for producing a polypeptide or polypeptide derivative encoded by a polynucleotide of the invention, which involves culturing a procaryotic or eucaryotic cell transformed or transfected with an expression cassette and/or vector of the invention, under conditions that allow expression of the polynucleotide molecule of the invention and, recovering the encoded polypeptide or polypeptide derivative from the cell culture.

[0039] A recombinant expression system can be selected from procaryotic and eucaryotic hosts. Eucaryotic hosts include, for example, yeast cells (e.g., Saccharomyces cerevisiae or Pichia pastoris), mammalian cells (e.g., COS1, NIH3T3, or JEG3 cells), arthropods cells (e.g., Spodoptera frugiperda (SF9) cells), and plant cells. Preferably, a procaryotic host such as E. coli is used. Bacterial and eucaryotic cells are available from a number of different sources that are known to those skilled in the art, e.g., the American Type Culture Collection (ATCC; Rockville, Md.).

[0040] The choice of the expression cassette will depend on the host system selected, as well as the features desired for the expressed polypeptide. For example, it may be useful to produce a polypeptide of the invention in a particular lipidated form or any other form. Typically, an expression cassette includes a constitutive or inducible promoter that is functional in the selected host system; a ribosome binding site; a start codon (ATG); if necessary, a region encoding a signal peptide, e.g., a lipidation signal peptide; a polynucleotide molecule of the invention; a stop codon; and, optionally, a 3′ terminal region (translation and/or transcription terminator). The signal peptide-encoding region is adjacent to the polynucleotide of the invention and is placed in the proper reading frame. The signal peptide-encoding region can be homologous or heterologous to the polynucleotide molecule encoding the mature polypeptide and it can be specific to the secretion apparatus of the host used for expression. The open reading frame constituted by the polynucleotide molecule of the invention, alone or together with the signal peptide, is placed under the control of the promoter so that transcription and translation occur in the host system. Promoters and signal peptide-encoding regions are widely known and available to those skilled in the art and include, for example, the promoter of Salmonella typhimurium (and derivatives) that is inducible by arabinose (promoter araB) and is functional in Gram-negative bacteria such as E. coli (U.S. Pat. No. 5,028,530; Cagnon et al., Protein Engineering 4(7):843, 1991); the promoter of the bacteriophage T7 RNA polymerase gene, which is functional in a number of E. coli strains expressing T7 polymerase (U.S. Pat. No. 4,952,496); the OspA lipidation signal peptide; and RlpB lipidation signal peptide (Takase et al., J. Bact. 169:5692, 1987).

[0041] The expression cassette is typically part of an expression vector, which is selected for its ability to replicate in the chosen expression system. Expression vectors (e.g., plasmids or viral vectors) can be chosen from, for example, those described in Pouwels et al. (Cloning Vectors: A Laboratory Manual, 1985, Supp. 1987) and can purchased from various commercial sources. Methods for transforming or transfecting host cells with expression vectors are well known in the art and will depend on the host system selected, as described in Ausubel et al. (supra).

[0042] Upon expression, a recombinant polypeptide of the invention (or a polypeptide derivative) is produced and remains in the intracellular compartment, is secreted/excreted in the extracellular medium or in the periplasmic space, or is embedded in the cellular membrane. The polypeptide can then be recovered in a substantially purified form from the cell extract or from the supernatant after centrifugation of the cell culture. Typically, the recombinant polypeptide can be purified by antibody-based affinity purification or by any other method known to a person skilled in the art, such as by genetic fusion to a small affinity-binding domain. Antibody-based affinity purification methods are also available for purifying a polypeptide of the invention extracted from a Helicobacter strain. Antibodies useful for immunoaffinity purification of the polypeptides of the invention can be obtained using methods described below.

[0043] Polynucleotides of the invention can also be used in DNA vaccination methods, using either a viral or bacterial host as gene delivery vehicle (live vaccine vector) or administering the gene in a free form, e.g., inserted into a plasmid. Therapeutic or prophylactic efficacy of a polynucleotide of the invention can be evaluated as is described below.

[0044] Accordingly, in a third aspect of the invention, there is provided (i) a vaccine vector such as a poxvirus, containing a polynucleotide molecule of the invention placed under the control of elements required for expression; (ii) a composition of matter containing a vaccine vector of the invention, together with a diluent or carrier; (iii) a pharmaceutical composition containing a therapeutically or prophylactically effective amount of a vaccine vector of the invention; (iv) a method for inducing an immune response against Helicobacter in a mammal (e.g., a human; alternatively, the method can be used in veterinary applications for treating or preventing Helicobacter infection of animals, e.g., cats or birds), which involves administering to the mammal an immunogenically effective amount of a vaccine vector of the invention to elicit an immune response, e.g., a protective or therapeutic immune response to Helicobacter; and (v) a method for preventing and/or treating a Helicobacter (e.g., H. pylori, H. felis, H. mustelae, or H. heilmanii) infection, which involves administering a prophylactic or therapeutic amount of a vaccine vector of the invention to an individual in need. Additionally, the third aspect of the invention encompasses the use of a vaccine vector of the invention in the preparation of a medicament for preventing and/or treating Helicobacter infection.

[0045] A vaccine vector of the invention can express one or several polypeptides or derivatives of the invention, as well as at least one additional Helicobacter antigen such as a urease apoenzyme or a subunit, fragment, homolog, mutant, or derivative thereof. In addition, it can express a cytokine, such as interleukin-2 (IL-2) or interleukin-12 (IL-12), that enhances the immune response. Thus, a vaccine vector can include an additional polynucleotide molecules encoding, e.g., urease subunit A, B, or both, or a cytokine, placed under the control of elements required for expression in a mammalian cell.

[0046] Alternatively, a composition of the invention can include several vaccine vectors, each of which being capable of expressing a polypeptide or derivative of the invention. A composition can also contain a vaccine vector capable of expressing an additional Helicobacter antigen such as urease apoenzyme, a subunit, fragment, homolog, mutant, or derivative thereof, or a cytokine such as IL-2 or IL-12.

[0047] In vaccination methods for treating or preventing infection in a mammal, a vaccine vector of the invention can be administered by any conventional route in use in the vaccine field, for example, to a mucosal (e.g., ocular, intranasal, oral, gastric, pulmonary, intestinal, rectal, vaginal, or urinary tract) surface or via a parenteral (e.g., subcutaneous, intradermal, intramuscular, intravenous, or intraperitoneal) route. Preferred routes depend upon the choice of the vaccine vector. The administration can be achieved in a single dose or repeated at intervals. The appropriate dosage depends on various parameters that are understood by those skilled in the art, such as the nature of the vaccine vector itself, the route of administration, and the condition of the mammal to be vaccinated (e.g., the weight, age, and general health of the mammal).

[0048] Live vaccine vectors that can be used in the invention include viral vectors, such as adenoviruses and poxviruses, as well as bacterial vectors, e.g., Shigella, Salmonella, Vibrio cholerae, Lactobacillus, Bacille bilié de Calmette-Guérin (BCG), and Streptococcus. An example of an adenovirus vector, as well as a method for constructing an adenovirus vector capable of expressing a polynucleotide molecule of the invention, is described in U.S. Pat. No. 4,920,209. Poxvirus vectors that can be used in the invention include, e.g., vaccinia and canary pox viruses, which are described in U.S. Pat. No. 4,722,848 and U.S. Pat. No. 5,364,773, respectively (also see, e.g., Tartaglia et al., Virology 188:217, 1992, for a description of a vaccinia virus vector, and Taylor et al, Vaccine 13:539, 1995, for a description of a canary poxvirus vector). Poxvirus vectors capable of expressing a polynucleotide of the invention can be obtained by homologous recombination, as described in Kieny et al. (Nature 312:163, 1984) so that the polynucleotide of the invention is inserted in the viral genome under appropriate conditions for expression in mammalian cells. Generally, the dose of viral vector vaccine, for therapeutic or prophylactic use, can be from about 1×10⁴ to about 1×10¹¹, advantageously from about 1×10⁷ to about 1×10¹⁰, or, preferably, from about 1×10⁷ to about 1×10⁹ plaque-forming units per kilogram. Preferably, viral vectors are administered parenterally, for example, in 3 doses that are 4 weeks apart. Those skilled in the art will recognize that it is preferable to avoid adding a chemical adjuvant to a composition containing a viral vector of the invention and thereby minimizing the immune response to the viral vector itself.

[0049] Non-toxicogenic Vibrio cholerae mutant strains that can be used in live oral vaccines are described by Mekalanos et al. (Nature 306:551, 1983) and in U.S. Pat. No. 4,882,278 (strain in which a substantial amount of the coding sequence of each of the two ctxA alleles has been deleted so that no functional cholerae toxin is produced); WO 92/11354 (strain in which the irgA locus is inactivated by mutation; this mutation can be combined in a single strain with ctxA mutations); and WO 94/1533 (deletion mutant lacking functional ctxA and attRS1 DNA sequences). These strains can be genetically engineered to express heterologous antigens, as described in WO 94/19482. An effective vaccine dose of a V. cholerae strain capable of expressing a polypeptide or polypeptide derivative encoded by a polynucleotide molecule of the invention can contain, e.g., about 1×10⁵ to about 1×10⁹, preferably about 1×10⁶ to about 1×10⁸ viable bacteria in an appropriate volume for the selected route of administration. Preferred routes of administration include all mucosal routes, but, most preferably, these vectors are administered intranasally or orally.

[0050] Attenuated Salmonella typhimurium strains, genetically engineered for recombinant expression of heterologous antigens, and their use as oral vaccines, are described by Nakayama et al. (Bio/Technology 6:693, 1988) and in WO 92/11361. Preferred routes of administration for these vectors include all mucosal routes. Most preferably, the vectors are administered intranasally or orally.

[0051] Others bacterial strains useful as vaccine vectors are described by High et al. (EMBO 11:1991, 1992) and Sizemore et al. (Science 270:299, 1995; Shigella flexneri); Medaglini et al. (Proc. Natl. Acad. Sci. U.S.A. 92:6868, 1995; (Streptococcus gordonii); Flynn (Cell. Mol. Biol. 40 (suppl. I):31, 1194), and in WO 88/6626, WO 90/0594, WO 91/13157, WO 92/1796, and WO 92/21376 (Bacille Calmette Guerin). In bacterial vectors, a polynucleotide of the invention can be inserted into the bacterial genome or it can remain in a free state, for example, carried on a plasmid.

[0052] An adjuvant can also be added to a composition containing a bacterial vector vaccine. A number of adjuvants that can be used are known to those skilled in the art. For example, preferred adjuvants can be selected from the list provided below.

[0053] According to a fourth aspect of the invention, there is also provided (i) a composition of matter containing a polynucleotide of the invention, together with a diluent or carrier; (ii) a pharmaceutical composition containing a therapeutically or prophylactically effective amount of a polynucleotide of the invention; (iii) a method for inducing an immune response against Helicobacter, in a mammal, by administering to the mammal an immunogenically effective amount of a polynucleotide of the invention to elicit an immune response, e.g., a protective immune response to Helicobacter; and (iv) a method for preventing and/or treating a Helicobacter (e.g., H. pylori, H. felis, H. mustelae, or H. heilmanii) infection, by administering a prophylactic or therapeutic amount of a polynucleotide of the invention to an individual in need of such treatment. Additionally, the fourth aspect of the invention encompasses the use of a polynucleotide of the invention in the preparation of a medicament for preventing and/or treating Helicobacter infection. The fourth aspect of the invention preferably includes the use of a polynucleotide molecule placed under conditions for expression in a mammalian cell, e.g., in a plasmid that is unable to replicate in mammalian cells and to substantially integrate into a mammalian genome.

[0054] Polynucleotides (for example, DNA or RNA molecules) of the invention can also be administered as such to a mammal as a vaccine. When a DNA molecule of the invention is used, it can be in the form of a plasmid that is unable to replicate in a mammalian cell and unable to integrate into the mammalian genome. Typically, a DNA molecule is placed under the control of a promoter suitable for expression in a mammalian cell. The promoter can function ubiquitously or tissue-specifically. Examples of non-tissue specific promoters include the early Cytomegalovirus (CMV) promoter (U.S. Pat. No. 4,168,062) and the Rous Sarcoma Virus promoter (Norton et al., Molec. Cell Biol. 5:281, 1985). The desmin promoter (Li et al., Gene 78:243, 1989; Li et al., J. Biol. Chem. 266:6562, 1991; Li et al., J. Biol. Chem. 268:10403, 1993) is tissue-specific and drives expression in muscle cells. More generally, useful promoters and vectors are described, e.g., in WO 94/21797 and by Hartikka et al. (Human Gene Therapy 7:1205, 1996).

[0055] For DNA/RNA vaccination, the polynucleotide of the invention can encode a precursor or a mature form of a polypeptide of the invention. When it encodes a precursor form, the precursor sequence can be homologous or heterologous. In the latter case, a eucaryotic leader sequence can be used, such as the leader sequence of the tissue-type plasminogen factor (tPA).

[0056] A composition of the invention can contain one or several polynucleotides of the invention. It can also contain at least one additional polynucleotide encoding another Helicobacter antigen, such as urease subunit A, B, or both, or a fragment, derivative, mutant, or analog thereof. A polynucleotide encoding a cytokine, such as interleukin-2 (IL-2) or interleukin-12 (IL-12), can also be added to the composition so that the immune response is enhanced. These additional polynucleotides are placed under appropriate control for expression. Advantageously, DNA molecules of the invention and/or additional DNA molecules to be included in the same composition are carried in the same plasmid.

[0057] Standard methods can be used in the preparation of therapeutic polynucleotides of the invention. For example, a polynucleotide can be used in a naked form, free of any delivery vehicles, such as anionic liposomes, cationic lipids, microparticles, e.g., gold microparticles, precipitating agents, e.g., calcium phosphate, or any other transfection-facilitating agent. In this case, the polynucleotide can be simply diluted in a physiologically acceptable solution, such as sterile saline or sterile buffered saline, with or without a carrier. When present, the carrier preferably is isotonic, hypotonic, or weakly hypertonic, and has a relatively low ionic strength, such as provided by a sucrose solution, e.g., a solution containing 20% sucrose.

[0058] Alternatively, a polynucleotide can be associated with agents that assist in cellular uptake. It can be, e.g., (i) complemented with a chemical agent that modifies cellular permeability, such as bupivacaine (see, e.g., WO 94/16737), (ii) encapsulated into liposomes, or (iii) associated with cationic lipids or silica, gold, or tungsten microparticles.

[0059] Anionic and neutral liposomes are well-known in the art (see, e.g., Liposomes: A Practical Approach, RPC New Ed, IRL Press, 1990, for a detailed description of methods for making liposomes) and are useful for delivering a large range of products, including polynucleotides.

[0060] Cationic lipids can also be used for gene delivery. Such lipids include, for example, Lipofectin™, which is also known as DOTMA (N-[1-(2,3-dioleyloxy)propyl]-N,N,N-trimethylammonium chloride), DOTAP (1,2-bis(oleyloxy)-3-(trimethylammonio)propane), DDAB (dimethyldioctadecylammonium bromide), DOGS (dioctadecylamidologlycyl spermine), and cholesterol derivatives. A description of these cationic lipids can be found in EP 187,702, WO 90/11092, U.S. Pat. No. 5,283,185, WO 91/15501, WO 95/26356, and U.S. Pat. No. 5,527,928. Cationic lipids for gene delivery are preferably used in association with a neutral lipid such as DOPE (dioleyl phosphatidylethanolamine; WO 90/11092). Other transfection-facilitating compounds can be added to a formulation containing cationic liposomes. A number of them are described in, e.g., WO 93/18759, WO 93/19768, WO 94/25608, and WO 95/2397. They include, e.g., spermine derivatives useful for facilitating the transport of DNA through the nuclear membrane (see, for example, WO 93/18759) and membrane-permeabilizing compounds such as GALA, Gramicidine S, and cationic bile salts (see, for example, WO 93/19768).

[0061] Gold or tungsten microparticles can also be used for gene delivery, as described in WO 91/359, WO 93/17706, and by Tang et al. (Nature 356:152, 1992). In this case, the microparticle-coated polynucleotides can be injected via intradermal or intraepidermal routes using a needleless injection device (“gene gun”), such as those described in U.S. Pat. No. 4,945,050, U.S. Pat. No. 5,015,580, and WO 94/24263.

[0062] The amount of DNA to be used in a vaccine recipient depends, e.g., on the strength of the promoter used in the DNA construct, the immunogenicity of the expressed gene product, the condition of the mammal intended for administration (e.g., the weight, age, and general health of the mammal), the mode of administration, and the type of formulation. In general, a therapeutically or prophylactically effective dose from about 1 μg to about 1 mg, preferably, from about 10 μg to about 800 μg, and, more preferably, from about 25 μg to about 250 μg, can be administered to human adults. The administration can be achieved in a single dose or repeated at intervals.

[0063] The route of administration can be any conventional route used in the vaccine field. As general guidance, a polynucleotide of the invention can be administered via a mucosal surface, e.g., an ocular, intranasal, pulmonary, oral, intestinal, rectal, vaginal, or urinary tract surface, or via a parenteral route, e.g., by an intravenous, subcutaneous, intraperitoneal, intradermal, intraepidermal, or intramuscular route. The choice of administration route will depend on, e.g., the formulation that is selected. A polynucleotide formulated in association with bupivacaine is advantageously administered into muscle. When a neutral or anionic liposome or a cationic lipid, such as DOTMA, is used, the formulation can be advantageously injected via intravenous, intranasal (for example, by aerosolization), intramuscular, intradermal, and subcutaneous routes. A polynucleotide in a naked form can advantageously be administered via the intramuscular, intradermal, or subcutaneous routes. Although not absolutely required, such a composition can also contain an adjuvant. A systemic adjuvant that does not require concomitant administration in order to exhibit an adjuvant effect is preferable.

[0064] The sequence information provided in the present application enables the design of specific nucleotide probes and primers that can be used in diagnostic methods. Accordingly, in a fifth aspect of the invention, there is provided a nucleotide probe or primer having a sequence found in, or derived by degeneracy of the genetic code from, a sequence shown in the sequence listing (odd numbers, up to SEQ ID NO: 629).

[0065] The term “probe” as used in the present application refers to DNA (preferably single stranded) or RNA molecules (or modifications or combinations thereof) that hybridize under the stringent conditions, as defined above, to polynucleotide molecules having sequences homologous to any of those shown in the sequence listing (odd numbers, up to SEQ ID NO: 629), or to a complementary or anti-sense sequence of any of those shown in the sequence listing (odd numbers, up to SEQ ID NO: 629). Generally, probes are significantly shorter than the full-length sequences shown in the sequence listing. For example, they can contain from about 5 to about 100, preferably from about 10 to about 80 nucleotides. In particular, probes have sequences that are at least 75%, preferably at least 85%, more preferably 95% homologous to a portion of a sequence as shown in the sequence listing (odd numbers, up to SEQ ID NO: 629), or a sequence complementary to any of such sequences.

[0066] Probes can contain modified bases, such as inosine, methyl-5-deoxycytidine, deoxyuridine, dimethylamino-5-deoxyuridine, or diamino-2,6-purine. Sugar or phosphate residues can also be modified or substituted. For example, a deoxyribose residue can be replaced by a polyamide (Nielsen et al., Science 254:1497, 1991) and phosphate residues can be replaced by ester groups such as diphosphate, alkyl, arylphosphonate, and phosphorothioate esters. In addition, the 2′-hydroxyl group on ribonucleotides can be modified by addition of, e.g., alkyl groups.

[0067] Probes of the invention can be used in diagnostic tests, or as capture or detection probes. Such capture probes can be immobilized on solid supports, directly or indirectly, by covalent means or by passive adsorption. A detection probe can be labeled by a detectable label, for example a label selected from radioactive isotopes; enzymes, such as peroxidase and alkaline phosphatase; enzymes that are able to hydrolyze a chromogenic, fluorogenic, or luminescent substrate; compounds that are chromogenic, fluorogenic, or luminescent; nucleotide base analogs; and biotin.

[0068] Probes of the invention can be used in any conventional hybridization method, such as in dot blot methods (Maniatis et al., Molecular Cloning: A Laboratory Manual, Cold Spring Harbor Laboratory Press, Cold Spring Harbor, N.Y., 1982), Southern blot methods (Southern, J. Mol. Biol. 98:503, 1975), northern blot methods (identical to Southern blot to the exception that RNA is used as a target), or a sandwich method (Dunn et al., Cell 12:23, 1977). As is known in the art, the latter technique involves the use of a specific capture probe and a specific detection probe that have nucleotide sequences that are at least partially different from each other.

[0069] Primers used in the invention usually contain about 10 to 40 nucleotides and are used to initiate enzymatic polymerization of DNA in an amplification process (e.g., PCR), an elongation process, or a reverse transcription method. In a diagnostic method involving PCR, the primers can be labeled.

[0070] Thus, the invention also encompasses (i) a reagent containing a probe of the invention for detecting and/or identifying the presence of Helicobacter in a biological material; (ii) a method for detecting and/or identifying the presence of Helicobacter in a biological material, in which (a) a sample is recovered or derived from the biological material, (b) DNA or RNA is extracted from the material and denatured, and (c) the sample is exposed to a probe of the invention, for example, a capture probe, a detection probe, or both, under stringent hybridization conditions, so that hybridization is detected; and (iii) a method for detecting and/or identifying the presence of Helicobacter in a biological material, in which (a) a sample is recovered or derived from the biological material, (b) DNA is extracted therefrom, (c) the extracted DNA is contacted with at least one, or, preferably two, primers of the invention, and amplified by the polymerase chain reaction, and (d) an amplified DNA molecule is produced.

[0071] As mentioned above, polypeptides that can be produced by expression of the polynucleotides of the invention can be used as vaccine antigens. Accordingly, a sixth aspect of the invention features a substantially purified polypeptide or polypeptide derivative having an amino acid sequence encoded by a polynucleotide of the invention.

[0072] A “substantially purified polypeptide” is defined as a polypeptide that is separated from the environment in which it naturally occurs and/or a polypeptide that is free of most of the other polypeptides that are present in the environment in which it was synthesized. The polypeptides of the invention can be purified from a natural source, such as a Helicobacter strain, or can be produced using recombinant methods.

[0073] Homologous polypeptides or polypeptide derivatives encoded by polynucleotides of the invention can be screened for specific antigenicity by testing cross-reactivity with an antiserum raised against a polypeptide having an amino acid sequence as shown in the sequence listing (even numbers, up to SEQ ID NO: 630). Briefly, a monospecific hyperimmune antiserum can be raised against a purified reference polypeptide as such or as a fusion polypeptide, for example, an expression product of MBP, GST, or His-tag systems, or a synthetic peptide predicted to be antigenic. The homologous polypeptide or derivative that is screened for specific antigenicity can be produced as such or as a fusion polypeptide. In the latter case, and if the antiserum is also raised against a fusion polypeptide, two different fusion systems are employed. Specific antigenicity can be determined using a number of methods, including Western blot (Towbin et al., Proc. Natl. Acad. Sci. U.S.A. 76:4350, 1979), dot blot, and ELISA methods, as described below.

[0074] In a Western blot assay, the product to be screened, either as a purified preparation or a total E. coli extract, is fractionated by SDS-PAGE, as described, for example, by Laemmli (Nature 227:680, 1970). After being transferred to a filter, such as a nitrocellulose membrane, the material is incubated with the mono specific hyperimmune antiserum, which is diluted in a range of dilutions from about 1:50 to about 1:5000, preferably from about 1:100 to about 1:500. Specific antigenicity is shown once a band corresponding to the product exhibits reactivity at any of the dilutions in the range.

[0075] In an ELISA assay, the product to be screened can be used as the coating antigen. A purified preparation is preferred, but a whole cell extract can also be used. Briefly, about 100 μL of a preparation of about 10 μg protein/ml is distributed into wells of a 96-well ELISA plate. The plate is incubated for about 2 hours at 37° C., then overnight at 4° C. The plate is washed with phosphate buffer saline (PBS) containing 0.05% Tween 20 (PBS/Tween buffer) and the wells are saturated with 250 μL PBS containing 1% bovine serum albumin (BSA), to prevent non-specific antibody binding. After 1 hour of incubation at 37° C., the plate is washed with PBS/Tween buffer. The antiserum is serially diluted in PBS/Tween buffer containing 0.5% BSA, and 100 μL dilutions are added to each well. The plate is incubated for 90 minutes at 37° C., washed, and evaluated using standard methods. For example, a goat anti-rabbit peroxidase conjugate can be added to the wells when the specific antibodies used were raised in rabbits. Incubation is carried out for about 90 minutes at 37° C. and the plate is washed. The reaction is developed with the appropriate substrate and the reaction is measured by colorimetry (absorbance measured spectrophotometrically). Under these experimental conditions, a positive reaction is shown once an O.D. value of 1.0 is detected with a dilution of at least about 1:50, preferably of at least about 1:500.

[0076] In a dot blot assay, a purified product is preferred, although a whole cell extract can be used. Briefly, a solution of the product at a concentration of about 100 μg/ml is serially diluted two-fold with 50 mM Tris-HCl (pH 7.5). One hundred μL of each dilution is applied to a filter, such as a 0.45 μm nitrocellulose membrane, set in a 96-well dot blot apparatus (Biorad). The buffer is removed by applying vacuum to the system. Wells are washed by addition of 50 mM Tris-HCl (pH 7.5) and the membrane is air-dried. The membrane is saturated in blocking buffer (50 mM Tris-HCl (pH 7.5), 0.15 M NaCl, 10 g/L skim milk) and incubated with an antiserum diluted from about 1:50 to about 1:5000, preferably about 1:500. The reaction is detected using standard methods. For example, a goat anti-rabbit peroxidase conjugate can be added to the wells when rabbit antibodies are used. Incubation is carried out for about 90 minutes at 37° C. and the blot is washed. The reaction is developed with the appropriate substrate and stopped. The reaction is then measured visually by the appearance of a colored spot, e.g., by colorimetry. Under these experimental conditions, a positive reaction is associated with detection of a colored spot for reactions carried out with a dilution of at least about 1:50, preferably, of at least about 1:500. Therapeutic or prophylactic efficacy of a polypeptide or polypeptide derivative of the invention can be evaluated as described below.

[0077] According to a seventh aspect of the invention, there is provided (i) a composition of matter containing a polypeptide of the invention together with a diluent or carrier; (ii) a pharmaceutical composition containing a therapeutically or prophylactically effective amount of a polypeptide of the invention; (iii) a method for inducing an immune response against Helicobacter in a mammal by administering to the mammal an immunogenically effective amount of a polypeptide of the invention to elicit an immune response, e.g., a protective immune response to Helicobacter; and (iv) a method for preventing and/or treating a Helicobacter (e.g., H. pylori, H. felis, H. mustelae, or H. heilmanii) infection, by administering a prophylactic or therapeutic amount of a polypeptide of the invention to an individual in need of such treatment. Additionally, this aspect of the invention includes the use of a polypeptide of the invention in the preparation of a medicament for preventing and/or treating Helicobacter infection.

[0078] The immunogenic compositions of the invention can be administered by any conventional route in use in the vaccine field, for example, to a mucosal (e.g., ocular, intranasal, pulmonary, oral, gastric, intestinal, rectal, vaginal, or urinary tract) surface or via a parenteral (e.g., subcutaneous, intradermal, intramuscular, intravenous, or intraperitoneal) route. The choice of the administration route depends upon a number of parameters, such as the adjuvant used. For example, if a mucosal adjuvant is used, the intranasal or oral route will be preferred, and if a lipid formulation or an aluminum compound is used, a parenteral route will be preferred. In the latter case, the subcutaneous or intramuscular route is most preferred. The choice of administration route can also depend upon the nature of the vaccine agent. For example, a polypeptide of the invention fused to CTB or to LTB will be best administered to a mucosal surface.

[0079] A composition of the invention can contain one or several polypeptides or derivatives of the invention. It can also contain at least one additional Helicobacter antigen, such as the urease apoenzyme, or a subunit, fragment, homolog, mutant, or derivative thereof.

[0080] For use in a composition of the invention, a polypeptide or polypeptide derivative can be formulated into or with liposomes, such as neutral or anionic liposomes, microspheres, ISCOMS, or virus-like particles (VLPs), to facilitate delivery and/or enhance the immune response. These compounds are readily available to those skilled in the art; for example, see Liposomes: A Practical Approach (supra). Adjuvants other than liposomes can also be used in the invention and are well known in the art (see, for example, the list provided below).

[0081] Administration can be achieved in a single dose or repeated as necessary at intervals that can be determined by one skilled in the art. For example, a priming dose can be followed by three booster doses at weekly or monthly intervals. An appropriate dose depends on various parameters, including the nature of the recipient (e.g., whether the recipient is an adult or an infant), the particular vaccine antigen, the route and frequency of administration, the presence/absence or type of adjuvant, and the desired effect (e.g., protection and/or treatment), and can be readily determined by one skilled in the art. In general, a vaccine antigen of the invention can be administered mucosally in an amount ranging from about 10 μg to about 500 mg, preferably from about 1 mg to about 200 mg. For a parenteral route of administration, the dose usually should not exceed about 1 mg, and is, preferably, about 100 μg.

[0082] When used as components of a vaccine, the polynucleotides and polypeptides of the invention can be used sequentially as part of a multi-step immunization process. For example, a mammal can be initially primed with a vaccine vector of the invention, such as a pox virus, e.g., via a parenteral route, and then boosted twice with a polypeptide encoded by the vaccine vector, e.g., via the mucosal route. In another example, liposomes associated with a polypeptide or polypeptide derivative of the invention can be used for priming, with boosting being carried out mucosally using a soluble polypeptide or polypeptide derivative of the invention, in combination with a mucosal adjuvant (e.g., LT).

[0083] Polypeptides and polypeptide derivatives of the invention can also be used as diagnostic reagents for detecting the presence of anti-Helicobacter antibodies, e.g., in blood samples. Such polypeptides can be about 5 to about 80, preferably, about 10 to 15 about 50 amino acids in length and can be labeled or unlabeled, depending upon the diagnostic method. Diagnostic methods involving such a reagent are described below.

[0084] Upon expression of a polynucleotide molecule of the invention, a polypeptide or polypeptide derivative is produced and can be purified using known methods. For example, the polypeptide or polypeptide derivative can be produced as a fusion protein containing a fused tail that facilitates purification. The fusion product can be used to immunize a small mammal, e.g., a mouse or a rabbit, in order to raise monospecific antibodies against the polypeptide or polypeptide derivative. The eighth aspect of the invention thus provides a monospecific antibody that binds to a polypeptide or polypeptide derivative of the invention.

[0085] By “monospecific antibody” is meant an antibody that is capable of reacting with a unique, naturally-occurring Helicobacter polypeptide. An antibody of the invention can be polyclonal or monoclonal. Monospecific antibodies can be recombinant, e.g., chimeric (e.g., consisting of a variable region of murine origin and a human constant region), humanized (e.g., a human immunoglobulin constant region and a variable region of animal, e.g., murine, origin), and/or single chain. Both polyclonal and monospecific antibodies can also be in the form of immunoglobulin fragments, e.g., F(ab)′2 or Fab fragments. The antibodies of the invention can be of any isotype, e.g., IgG or IgA, and polyclonal antibodies can be of a single isotype or can contain a mixture of isotypes.

[0086] The antibodies of the invention, which can be raised to a polypeptide or polypeptide derivative of the invention, can be produced and identified using standard immunological assays, e.g., Western blot assays, dot blot assays, or ELISA (see, e.g., Coligan et al., Current Protocols in Immunology, John Wiley & Sons, Inc., New York, N.Y., 1994). The antibodies can be used in diagnostic methods to detect the presence of Helicobacter antigens in a sample, such as a biological sample. The antibodies can also be used in affinity chromatography methods for purifying a polypeptide or polypeptide derivative of the invention. As is discussed further below, the antibodies can also be used in prophylactic and therapeutic passive immunization methods.

[0087] Accordingly, a ninth aspect of the invention provides (i) a reagent for detecting the presence of Helicobacter in a biological sample that contains an antibody, polypeptide, or polypeptide derivative of the invention; and (ii) a diagnostic method for detecting the presence of Helicobacter in a biological sample, by contacting the biological sample with an antibody, a polypeptide, or a polypeptide derivative of the invention, so that an immune complex is formed, and detecting the complex as an indication of the presence of Helicobacter in the sample or the organism from which the sample was derived. The immune complex is formed between a component of the sample and the antibody, polypeptide, or polypeptide derivative, and that any unbound material can be removed prior to detecting the complex. A polypeptide reagent can be used for detecting the presence of anti-Helicobacter antibodies in a sample, e.g., a blood sample, while an antibody of the invention can be used for screening a sample, such as a gastric extract or biopsy sample, for the presence of Helicobacter polypeptides.

[0088] For use in diagnostic methods, the reagent (e.g., the antibody, polypeptide, or polypeptide derivative of the invention) can be in a free state or can be immobilized on a solid support, such as, for example, on the interior surface of a tube or on the surface, or within pores, of a bead. Immobilization can be achieved using direct or indirect means. Direct means include passive adsorption (i.e., non-covalent binding) or covalent binding between the support and the reagent. By “indirect means” is meant that an anti-reagent compound that interacts with the reagent is first attached to the solid support. For example, if a polypeptide reagent is used, an antibody that binds to it can serve as an anti-reagent, provided that it binds to an epitope that is not involved in recognition of antibodies in biological samples. Indirect means can also employ a ligand-receptor system, for example, a molecule, such as a vitamin, can be grafted onto the polypeptide reagent and the corresponding receptor can be immobilized on the solid phase. This concept is illustrated by the well known biotin-streptavidin system. Alternatively, indirect means can be used, e.g., by adding to the reagent a peptide tail, chemically or by genetic engineering, and immobilizing the grafted or fused product by passive adsorption or covalent linkage of the peptide tail.

[0089] According to a tenth aspect of the invention, there is provided a process for purifying, from a biological sample, a polypeptide or polypeptide derivative of the invention, which involves carrying out antibody-based affinity chromatography with the biological sample, wherein the antibody is a monospecific antibody of the invention.

[0090] For use in a purification process of the invention, the antibody can be polyclonal or monospecific, and preferably is of the IgG type. Purified IgGs can be prepared from an antiserum using standard methods (see, e.g., Coligan et al., supra). Conventional chromatography supports, as well as standard methods for grafting antibodies, are described, for example, by Harlow et al. (Antibodies: A Laboratory Manual, Cold Spring Harbor Laboratory Press, Cold Spring Harbor, N.Y., 1988).

[0091] Briefly, a biological sample, such as an H. pylori extract, preferably in a buffer solution, is applied to a chromatography material, which is, preferably, equilibrated with the buffer used to dilute the biological sample, so that the polypeptide or polypeptide derivative of the invention (i.e., the antigen) is allowed to adsorb onto the material. The chromatography material, such as a gel or a resin coupled to an antibody of the invention, can be in batch form or in a column. The unbound components are washed off and the antigen is eluted with an appropriate elution buffer, such as a glycine buffer, a buffer containing a chaotropic agent, e.g., guanidine HCl, or a buffer having high salt concentration (e.g., 3 M MgCl₂). Eluted fractions are recovered and the presence of the antigen is detected, e.g., by measuring the absorbance at 280 nm.

[0092] An antibody of the invention can be screened for therapeutic efficacy as follows. According to an eleventh aspect of the invention, there is provided (i) a composition of matter containing a monospecific antibody of the invention, together with a diluent or carrier; (ii) a pharmaceutical composition containing a therapeutically or prophylactically effective amount of a monospecific antibody of the invention, and (iii) a method for treating or preventing Helicobacter (e.g., H. pylori, H. felis, H. mustelae, or H. heilmanii) infection, by administering a therapeutic or prophylactic amount of a monospecific antibody of the invention to an individual in need of such treatment. In addition, the eleventh aspect of the invention includes the use of a monospecific antibody of the invention in the preparation of a medicament for treating or preventing Helicobacter infection.

[0093] The monospecific antibody can be polyclonal or monoclonal, and is, preferably, predominantly of the IgA isotype. In passive immunization methods, the antibody is administered to a mucosal surface of a mammal, e.g., the gastric mucosa, e.g., orally or intragastrically, optionally, in the presence of a bicarbonate buffer. Alternatively, systemic administration, not requiring a bicarbonate buffer, can be carried out. A monospecific antibody of the invention can be administered as a single active agent or as a mixture with at least one additional monospecific antibody specific for a different Helicobacter polypeptide. The amount of antibody and the particular regimen used can be readily determined by one skilled in the art. For example, daily administration of about 100 to 1,000 mg of antibody over one week, or three doses per day of about 100 to 1,000 mg of antibody over two or three days, can be effective regimens for most purposes.

[0094] Therapeutic or prophylactic efficacy can be evaluated using standard methods in the art, e.g., by measuring induction of a mucosal immune response or induction of protective and/or therapeutic immunity, using, e.g., the H. felis mouse model and the procedures described by Lee et al. (Eur. J. Gastroenterology & Hepatology 7:303, 1995) or Lee et al. (J. Infect. Dis. 172:161, 1995). Those skilled in the art will recognize that the H. felis strain of the model can be replaced with another Helicobacter strain. For example, the efficacy of polynucleotide molecules and polypeptides from H. pylori is, preferably, evaluated in a mouse model using an H. pylori strain. Protection can be determined by comparing the degree of Helicobacter infection in the gastric tissue assessed by, for example, urease activity, bacterial counts, or gastritis, to that of a control group. Protection is shown when infection is reduced by comparison to the control group. Such an evaluation can be made for polynucleotides, vaccine vectors, polypeptides, and polypeptide derivatives, as well as for antibodies of the invention.

[0095] For example, various doses of an antibody of the invention can be administered to the gastric mucosa of mice previously challenged with an H. pylori strain, as described, e.g., by Lee et al. (supra). Then, after an appropriate period of time, the bacterial load of the mucosa can be estimated by assessing urease activity, as compared to a control. Reduced urease activity indicates that the antibody is therapeutically effective.

[0096] Adjuvants that can be used in any of the vaccine compositions described above are described as follows. Adjuvants for parenteral administration include, for example, aluminum compounds, such as aluminum hydroxide, aluminum phosphate, and aluminum hydroxy phosphate. The antigen can be precipitated with, or adsorbed onto, the aluminum compound using standard methods. Other adjuvants, such as RIBI (ImmunoChem, Hamilton, Mont.), can also be used in parenteral administration.

[0097] Adjuvants that can be used for mucosal administration include, for example, bacterial toxins, e.g., the cholera toxin (CT), the E. coli heat-labile toxin (LT), the Clostridium difficile toxin A, the pertussis toxin (PT), and combinations, subunits, toxoids, or mutants thereof. For example, a purified preparation of native cholera toxin subunit B (CTB) can be used. Fragments, homologs, derivatives, and fusions to any of these toxins can also be used, provided that they retain adjuvant activity. Preferably, a mutant having reduced toxicity is used. Suitable mutants are described, e.g., in WO 95/17211 (Arg-7-Lys CT mutant), WO 96/6627 (Arg-192-Gly LT mutant), and WO 95/34323 (Arg-9-Lys and Glu-129-Gly PT mutant). Additional LT mutants that can be used in the methods and compositions of the invention include, e.g., Ser-63-Lys, Ala-69-Gly, Glu-110-Asp, and Glu-112-Asp mutants. Other adjuvants, such as the bacterial monophosphoryl lipid A (MPLA) of, e.g., E. coli, Salmonella minnesota, Salmonella typhimurium, or Shigella flexneri; saponins, and polylactide glycolide (PLGA) microspheres, can also be used in mucosal administration. Adjuvants useful for both mucosal and parenteral administrations, such as polyphosphazene (WO 95/2415), can also be used.

[0098] Any pharmaceutical composition of the invention, containing a polynucleotide, polypeptide, polypeptide derivative, or antibody of the invention, can be manufactured using standard methods. It can be formulated with a pharmaceutically acceptable diluent or carrier, e.g., water or a saline solution, such as phosphate buffer saline, optionally, including a bicarbonate salt, such as sodium bicarbonate, e.g., 0.1 to 0.5 M. Bicarbonate can advantageously be added to compositions intended for oral or intragastric administration. In general, a diluent or carrier can be selected on the basis of the mode and route of administration, and standard pharmaceutical practice. Suitable pharmaceutical carriers and diluents, as well as pharmaceutical necessities for their use in pharmaceutical formulations, are described in Remington's Pharmaceutical Sciences, a standard reference text in this field and in the USP/NF.

[0099] The invention also includes methods in which gastroduodenal infections, such as Helicobacter infection, are treated by oral administration of a Helicobacter polypeptide of the invention and a mucosal adjuvant, in combination with an antibiotic, an antisecretory agent, a bismuth salt, an antacid, sucralfate, or a combination thereof. Examples of such compounds that can be administered with the vaccine antigen and an adjuvant are antibiotics, including, e.g., macrolides, tetracyclines, β-lactams, aminoglycosides, quinolones, penicillins, and derivatives thereof (specific examples of antibiotics that can be used in the invention include, e.g., amoxicillin, clarithromycin, tetracycline, metronidizole, erythromycin, cefuroxime, and erythromycin); antisecretory agents, including, e.g., H₂-receptor antagonists (e.g., cimetidine, ranitidine, famotidine, nizatidine, and roxatidine), proton pump inhibitors (e.g., omeprazole, lansoprazole, and pantoprazole), prostaglandin analogs (e.g., misoprostil and enprostil), and anticholinergic agents (e.g., pirenzepine, telenzepine, carbenoxolone, and proglumide); and bismuth salts, including colloidal bismuth subcitrate, tripotassium dicitrate bismuthate, bismuth subsalicylate, bicitropeptide, and pepto-bismol (see, e.g., Goodwin et al., Helicobacter pylori, Biology and Clinical Practice, CRC Press, Boca Raton, Fla., pp 366-395, 1993; Physicians' Desk Reference, 49^{th} edn., Medical Economics Data Production Company, Montvale, N.J., 1995). In addition, compounds containing more than one of the above-listed components coupled together, e.g., ranitidine coupled to bismuth subcitrate, can be used. The invention also includes compositions for carrying out these methods, i.e., compositions containing a Helicobacter antigen (or antigens) of the invention, an adjuvant, and one or more of the above-listed compounds, in a pharmaceutically acceptable carrier or diluent.

[0100] Amounts of the above-listed compounds used in the methods and compositions of the invention can readily be determined by one skilled in the art. In addition, one skilled in the art can readily design treatment/immunization schedules. For example, the non-vaccine components can be administered on days 1-14, and the vaccine antigen+adjuvant can be administered on days 7, 14, 21, and 28.

[0101] Methods and pharmaceutical compositions of the invention can be used to treat or to prevent Helicobacter infections and, accordingly, gastroduodenal diseases associated with these infections, including acute, chronic, and atrophic gastritis, and peptic ulcer diseases, e.g., gastric and duodenal ulcers.

[0102] The invention is further illustrated by the following examples. Example 1 describes identification of genes, such as genes that encode the polypeptides of the invention, in the Helicobacter genome, as well as identification of signal sequences, and primer design for amplification of genes lacking signal sequences. Example 2 describes cloning of DNA molecules encoding polypeptides of the invention into a vector that provides a histidine tag, and production and purification of the resulting his-tagged fusion proteins. Example 3 describes methods for cloning DNA encoding the polypeptides of the invention so that they can be produced without his-tags, and Example 4 describes methods for purifying recombinantly produced polypeptides of the invention.

### EXAMPLE 1

### Identification of Genes in the H. pylori Genome, Identification of Signal Sequences, and Primer Design for Amplification of Genes Lacking Signal Sequences

[0103] 1.A. Creating H. pylori Genomic Databases

[0104] The H. pylori genome was provided as a text file containing a single contiguous string of nucleotides that had been determined to be 1.76 Megabases in length. The complete genome was split into 17 separate files using the program SPLIT (Creativity in Action), giving rise to 16 contigs, each containing 100,000 nucleotides, and a 17^{th} contig containing the remaining 76,000 nucleotides. A header was added to each of the 17 files using the format: >hpg0.txt (representing contig 1), .hpg1.txt (representing contig 2), etc. The resulting 17 files, named hpg0 through hpg16, were then copied together to form one file that represented the plus strand of the complete H. pylori genome. The constructed database was given the designation “H.” A negative strand database of the H. pylori genome was created similarly by first creating a reverse complement of the positive strand using the program SeqPup (D. G. Gilbert, Indiana University Biology Department) and then performing the same procedure as described above for the plus strand. This database was given the designation “N.”

[0105] The regions predicted to encode open reading frames (ORFs) were defined for the complete H. pylori genome using the program GENEMARK™ (Borodovsky et al., Comp. Chem. 17:123, 1993). A database was created from a text file containing an annotated version of all ORFs predicted to be encoded by the H. pylori genome for both the plus and minus strands, and was given the designation “O.” Each ORF was assigned a number indicating its location on the genome and its position relative to other genes. No manipulation of the text file was required.

[0106] 1.B. Searching the H. pylori Databases

[0107] The databases constructed as is described above were searched using the program FASTA (Pearson et al., Proc. Natl. Acad. Sci. U.S.A. 85:2444-2448, 1988). FASTA was used for searching either a DNA sequence against either of the gene databases (“H” and/or “N”), or a peptide sequence against the ORF library (“O”). TFASTX was used to search a peptide sequence against all possible reading frames of a DNA database (“H” and/or “N” libraries). Potential frameshifts also being resolved, FASTX was used for searching the translated reading frames of a DNA sequence against either a DNA database, or a peptide sequence against the protein database.

[0108] 1.C. Isolation of DNA Sequences from the H. pylori Genome

[0109] The FASTA searches against the constructed DNA databases identified exact nucleotide coordinates on one or more of the isolated contigs, and therefore the location of the target DNA. Once the exact location of the target sequence was known, the contig identified to carry the gene was exported into the software package MapDraw (DNAStar, Inc.) and the gene was isolated. Gene sequences with flanking DNA was then excised and copied into the EditSeq. Software package (DNAStar, Inc.) for further analysis.

[0110] 1.D. Identification of Signal Sequences

[0111] The deduced protein encoded by a target gene sequence is analyzed using the PROTEAN software package (DNAStar, Inc.). This analysis predicts those areas of the protein that are hydrophobic by using the Kyte-Doolittle algorithm, and identifies any potential polar residues preceding the hydrophobic core region, which is typical for many signal sequences. For confirmation, the target protein is then searched against a PROSITE database (DNAStar, Inc.) consisting of motifs and signatures. Characteristic of many signal sequences and hydrophobic regions in general, is the identification of predicted prokaryotic lipid attachment sites. Where confirmation between the two approaches is apparent at the N-terminus of any protein, putative cleavage sites are sought. Specifically, this includes the presence of either an Alanine (A), Serine (S), or Glycine (G) residue immediately after the core hydrophobic region. In the case of lipoproteins, a Cysteine (C) residue would be identified as the +1 residue, post-cleavage.

[0112] 1.E. Rational Design of PCR Primers Based on the Identification of Signal Sequences

[0113] In order to clone gene sequences as N-terminus translational fusions for the generation of recombinant proteins with N-terminal Histidine tags, the gene sequence that specifies the signal sequence is omitted. The 5′-end of the gene-specific portion of the N-terminal primer is designed to start at the first codon beyond the cleavage site. In the case of lipoproteins, the 5′- end of the N-terminal primer begins at the second codon, immediately after the modifiable residue at position +1 post-cleavage. The omission of the signal sequence from the recombinant allows for one-step purification, and potential problems associated with insertion of signal sequences in the membrane of the host strain carrying the hybrid construct are avoided.

### EXAMPLE 2

### Preparation of Isolated DNA Encoding GHPO147, GHPO615, GHPO961, and GHPO1282, and Production of these Polypeptides as Histidine-Tagged Fusion Proteins

[0114] 2.A. Preparation of Genomic DNA from Helicobacter pylori

[0115] H. pylori strain ORV2001, stored in LB medium containing 50% glycerol at −70° C., is grown on Colombia agar containing 7% sheep blood for 48 hours under microaerophilic conditions (8-10% CO₂, 5-7% O₂, 85-87% N₂). Cells are harvested, washed with phosphate buffer saline (PBS) (pH 7.2), and DNA is then extracted from the cells using the Rapid Prep Genomic DNA Isolation kit (Pharmacia Biotech).

[0116] 2.B. PCR Amplification

[0117] DNA molecules encoding the polypeptides of the invention are amplified from genomic DNA, as can be prepared as is described above, by the Polymerase Chain Reaction (PCR) using primers that can readily be designed by one skilled in the art. For example, to amplify genes encoding GHPO147, GHPO615, GHPO961, and GHPO1282, the following primers can be used:

[0118] Appropriate amplification reaction conditions can readily be determined by one skilled in the art. For example, the following conditions can be used for amplification of DNA encoding GHPO615 using the primers set forth above: initial denaturation at 94° C. for 5 minutes, 25 cycles of denaturation at 97° C. for 30 seconds, hybridization at 55° C. for 1 minute, and elongation at 72° C. for 2 minutes, using Vent DNA polymerase. In the case of amplifying DNA encoding GHPO1282 with the primers set forth above, the following conditions can be used: initial denaturation at 94° C. for 5 minutes, 25 cycles of denaturation at 94° C. for 30 seconds, hybridization at 45° C. for 30 seconds, and elongation at 72° C. for 30 seconds, followed by a final elongation at 72° C. for 7 minutes, using Vent DNA polymerase.

[0119] 2.C. Transformation and Selection of Transformants

[0120] A single PCR product is thus amplified and then is digested at 37° C. for 2 hours with BamHI and XhoI together in a 20 μl reaction volume. The digested product is ligated to similarly cleaved pET28a (Novagen) that is dephosphorylated prior to the ligation by treatment with Calf Intestinal Alkaline Phosphatase (CIP). The gene fusion constructed in this manner allows one-step affinity purification of the resulting fusion protein because of the presence of histidine residues at the N-terminus of the fusion protein, which are encoded by the vector.

[0121] The ligation reaction (20 μl) is carried out at 14° C. overnight and then is used to transform 100 μl fresh E. coli XL1-blue competent cells (Novagen). The cells are incubated on ice for 2 hours, heat-shocked at 42° C. for 30 seconds, and returned to ice for 90 seconds. The samples are then added to 1 ml LB broth in the absence of selection and grown at 37° C. for 2 hours. The cells are plated out on LB agar containing kanamycin (50 μg/ml) at a 10× and neat dilution and incubated overnight at 37 ° C. The following day, 50 colonies are picked, plated onto secondary plates, and incubated at 37° C. overnight.

[0122] Five colonies are picked, grown in 3 ml LB broth supplemented with kanamycin (100 μg/ml), and grown overnight at 37° C. Plasmid DNA is extracted using the Quiagen mini-prep method and is quantitated by agarose gel electrophoresis.

[0123] PCR is performed with the gene-specific primers under the conditions set forth above and transformant DNA is confirmed to contain the desired insert. If PCR-positive, one of the five plasmid DNA samples (500 ng) extracted from the E. coli XL1-blue cells is used to transform competent BL21 (λDE3) E. coli competent cells (Novagen; as described previously). Transformants (10) are picked, plated onto selective kanamycin (50 μg/ml)-containing LB agar plates, and stored as a research stock in LB containing 50% glycerol.

[0124] 2.D. Purification of Recombinant Proteins

[0125] One ml of frozen glycerol stock prepared as described in 2.C. is used to inoculate 50 ml of LB medium containing 25 μg/ml kanamycin in a 250 ml Erlenmeyer flask. The flask is incubated at 37° C. for 2 hours or until the absorbance at 600 nm (OD₆₀₀) reaches 0.4-1.0. The culture is stopped from growing by placing the flask at 4° C. overnight. The following day, 10 ml of the overnight culture is used to inoculate 240 ml LB medium containing kanamycin (25 μg/ml), with the initial OD₆₀₀ being about 0.02-0.04. Four flasks are inoculated for each ORF. The cells are grown to an OD₆₀₀ of 1.0 (about 2 hours at 37° C.), a 1 ml sample is harvested by centrifugation, and the sample is analyzed by SDS-PAGE to detect any leaky expression. The remaining culture is induced with 1 mM IPTG and the induced cultures are grown for an additional 2 hours at 37° C.

[0126] The final OD₆₀₀ reading is taken and the cells are harvested by centrifugation at 5,000×g for 15 minutes at 4° C. The supernatant is discarded and the pellets are resuspended in 50 mM Tris-HCl (pH18.0), 2 mM EDTA. Two hundred and fifty ml of buffer are used for each 1 L of culture and the cells are recovered by centrifugation at 12,000×g for 20 minutes. The supernatant is discarded and the pellets are stored at −45° C.

[0127] 2.E. Protein Purification

[0128] Pellets obtained using the methods described in 2.D. are thawed and resuspended in 95 ml of 50 mM Tris-HCl (pH 8.0). Pefabloc and lysozyme are added to final concentrations of 100 μM and 100 μg/ml, respectively. The mixture is homogenized with magnetic stirring at 5° C. for 30 minutes. Benzonase (Merck) is added to a final concentration of 1 U/ml, in the presence of 10 mM MgCl₂, to ensure total digestion of the DNA. The suspension is sonicated (Branson Sonifier 450) for 3 cycles of 2 minutes each at maximum output. The homogenate is centrifuged at 19,000×g for 15 minutes and both the supernatant and the pellet are analyzed by SDS-PAGE to detect the cellular location of the target protein in the soluble or insoluble fractions, as is described further below.

[0129] 2.E.1. Soluble Fraction

[0130] If the target protein is produced in a soluble form (i.e., in the supernatant obtained using the methods described in 2.E.) NaCl and imidazole are added to the supernatant to final concentrations of 50 mM Tris-HCl (pH 8.0), 0.5 M NaCl, and 10 mM imidazole (buffer A). The mixture is filtered through a 0.45 μm membrane and loaded onto an IMAC column (Pharmacia HiTrap chelating Sepharose; 1 ml), which has been charged with nickel ions according to the manufacturer's recommendations. After loading, the column is washed with 50 column volumes of buffer A and the recombinant protein is eluted with 5 ml of buffer B (50 mM Tris-HCl (pH 8.0), 0.5 M NaCl, 500 mM imidazole).

[0131] The elution profile is monitored by measuring the absorbance of the fractions at 280 nm. Fractions corresponding to the protein peak are pooled, dialyzed against PBS containing 0.5 M arginine, filtered through a 0.22 μm membrane, and stored at −45° C.

[0132] 2.E.2. Insoluble Fraction

[0133] If the target protein is expressed in the insoluble fraction (pellets obtained using the methods described in 2.E.), purification is conducted under denaturing conditions. NaCl, imidazole, and urea are added to the resuspended pellet to final concentrations of 50 mM Tris-HCl (pH 8.0), 0.5 M NaCl, 10 mM imidazole, and 6 M urea (buffer C). After complete solubilization, the mixture is filtered through a 0.45 μm membrane and loaded onto an IMAC column.

[0134] The purification procedures on the IMAC column are the same as are described in 2.E.1., except that 6 M urea is included in all of the buffers used and 10 column volumes of buffer C are used to wash the column after protein loading, instead of 50 column volumes.

[0135] The protein fractions eluted from the IMAC column with buffer D (buffer C containing 500 mM imidazole) are pooled. Arginine is added to the solution to a final concentration of 0.5 M, and the mixture is dialyzed against PBS containing 0.5 M arginine and various concentrations of urea (4 M, 3 M, 2 M, 1 M, and 0.5 M) to progressively decrease the concentration of urea. The final dialysate is filtered through a 0.22 μm membrane and stored at −45° C.

[0136] Alternatively, when the above-described purification process is not as efficient as it should be, two other processes can be used and are described as follows. A first alternative involves the use of a mild denaturant, N-octyl glucoside (NOG). Briefly, a pellet obtained as is described in 2.E. is homogenized in a solution of 5 mM imidazole, 500 mM sodium chloride, and 20 mM Tris-HCl (pH 7.9) by microfluidization at a pressure of 15,000 psi, and is clarified by centrifugation at 4,000-5,000×g. The pellet is recovered, resuspended in 50 mM NaPO₄ (pH 7.5) containing 1-2% weight/volume NOG, and homogenized. The NOG-soluble impurities are removed by centrifugation. The pellet is extracted once more by repeating the preceding extraction step. The pellet is dissolved in 8 M urea, 50 mM Tris (pH 8.0). The urea-solubilized protein is diluted with an equal volume of 2 M arginine, 50 mM Tris (pH 8.0), and is dialyzed against 1 M arginine for 24-48 hours to remove the urea. The final dialysate is filtered through a 0.22 μm membrane and stored at −45° C.

[0137] A second alternative involves the use of a strong denaturant, such as guanidine hydrochloride. Briefly, a pellet obtained as is described in 2.E. is homogenized in a solution of 5 mM imidazole, 500 mM sodium chloride, and 20 mM Tris-HCl (pH 7.9) by microfluidization at a pressure of 15,000 psi, and is clarified by centrifugation at 4,000-5,000×g. The pellet is recovered, resuspended in 6 M guanidine hydrochloride, and passed through an IMAC column charged with Ni⁺⁺. The bound antigen is eluted with 8 M urea (pH 8.5). β-mercaptoethanol is added to the eluted protein to a final concentration of 1 mM, and then the eluted protein is passed through a Sephadex G-25 column equilibrated in 0.1 M acetic acid. Protein eluted from the column is slowly added to 4 volumes of 50 mM phosphate buffer (H 7.0), and the protein remains in solution.

[0138] 2.F. Evaluation of the Protective Activity of the Purified Protein

[0139] Groups of 10 OF1 mice (IFFA Credo) are immunized rectally with 25 μg of the purified recombinant protein, admixed with 1 μg of cholera toxin (Berna) in physiological buffer. Mice are immunized on days 0, 7, 14, and 21. Fourteen days after the last immunization, the mice are challenged with H. pylori strain ORV2001, grown in liquid media (the cells are grown on agar plates, as described in 2.A., and, after harvest, are resuspended in Brucella broth; the flasks are then incubated overnight at 37° C.). Fourteen days after challenge, the mice are sacrificed and their stomachs are removed. The amount of H. pylori is determined by measuring the urease activity in the stomach and by culture.

[0140] 2.G. Production of Monospecific Polyclonal Antibodies

[0141] 2.G.1. Hyperimmune Rabbit Antiserum

[0142] New Zealand rabbits are injected both subcutaneously and intramuscularly with 100 μg of a purified fusion polypeptide, as obtained using the methods described in 2.E.1. or 2.E.2., in the presence of Freund's complete adjuvant and in a total volume of approximately 2 ml. Twenty one and 42 days after the initial injection, booster doses, which are identical to the priming doses, except that Freund's incomplete adjuvant is used, are administered in the same way. Fifteen days after the last injection, animal serum is recovered, decomplemented, and filtered through a 0.45 μm membrane.

[0143] 2.G.2. Mouse Hyperimmune Ascites Fluid

[0144] Ten mice are injected subcutaneously with 10-50 μg of a purified fusion polypeptide as obtained using the methods described in 2.E. 1. or 2.E.2., in the presence of Freund's complete adjuvant and in a volume of approximately 200 μl. Seven and 14 days after the initial injection, booster doses, which are identical to the priming doses, except that Freund's incomplete adjuvant is used, are administered in the same way. Twenty one and 28 days after the initial infection, mice receive 50 μg of the antigen alone intraperitoneally. On day 21, mice are also injected intraperitoneally with sarcoma 180/TG cells CM26684 (Lennette et al., Diagnostic Procedures for Viral, Rickettsial, and Chlamydial Infections, 5th Ed. Washington DC, American Public Health Association, 1979). Ascites fluid is collected 10-13 days after the last injection.

### EXAMPLE 3

### Methods for Producing Transcriptional Fusions Lacking His-tags

[0145] Methods for amplification and cloning of DNA encoding the polypeptides of the invention as transcriptional fusions lacking His-tags are described as follows. Two PCR primers for each clone are designed based upon the sequences of the polynucleotides that encode them (see the attached sequence listing, odd numbers, up to SEQ ID NO: 629). These primers can be used to amplify DNA encoding the polypeptides of the invention from any H. pylori strain, including, for example, ORV2001 and the strain deposited as ATCC deposit number 43579, as well as from other Helicobacter species.

[0146] The N-terminal primers are designed to include the ribosome binding site of the target gene, the ATG start site, and any signal sequence and cleavage site. The N-terminal primers can include a 5′ clamp and a restriction endonuclease recognition site, such as that for BamHI (GGATCC), which facilitates subsequent cloning. Similarly, the C-terminal primers can include a restriction endonuclease recognition site, such as that for XhoI (CTCGAG), which can be used in subsequent cloning, and a TAA stop codon.

[0147] Amplification of genes encoding the polypeptides of the invention can be carried out using Thermalase DNA Polymerase under the conditions described above in Example 2. Alternatively, Vent DNA polymerase (New England Biolabs), Pwo DNA polymerase (Boehringer Mannheim), or Taq DNA polymerase (Appligene) can be used, according to instructions provided by the manufacturers.

[0148] A single PCR product for each clone is amplified and cloned into appropriately cleaved pET 24 (e.g., BamHI-XhoI cleaved pET 24), resulting in the construction of a transcriptional fusion that permits expression of the proteins without His-tags. The expressed products can be purified as denatured proteins that are refolded by dialysis into 1 M arginine.

[0149] Cloning into pET 24 allows transcription of the genes from the T7 promoter, which is supplied by the vector, but relies upon binding of the RNA-specific DNA polymerase to the intrinsic ribosome binding sites of the genes, and thereby expression of the complete ORF. The amplification, digestion, and cloning protocols that can be used in this method are as described above for constructing translational fusions.

### EXAMPLE 4

### Purification of the Polypeptides of the Invention by Immunoaffinity

[0150] 4.A. Purification of Specific IgGs

[0151] An immune serum, as prepared as is described in section 2.G., is applied to a protein A Sepharose Fast Flow column (Pharmacia) equilibrated in 100 mM Tris-HCl (pH 8.0). The resin is washed by applying 10 column volumes of 100 mM Tris-HCl and 10 volumes of 10 mM Tris-HCl (pH 8.0) to the column. IgG antibodies are eluted with 0.1 M glycine buffer (pH 3.0) and are collected as 5 ml fractions to each of which is added 0.25 ml 1 M Tris-HCl (pH 8.0). The optical density of the eluate is measured at 280 nm and fractions containing the IgG antibodies are pooled, dialyzed against 50 mM Tris-HCl (pH 8.0), and, if necessary, stored frozen at −70° C.

[0152] 4.B. Preparation of the Column

[0153] An appropriate amount of CNBr-activated Sepharose 4B gel (1 g of dried gel provides for approximately 3.5 ml of hydrated gel; gel capacity is from 5 to 10 mg coupled IgG/ml of gel) manufactured by Pharmacia (17-0430-01) is suspended in 1 mM HCl buffer and washed with a buchner by adding small quantities of 1 mM HCl buffer. The total volume of buffer is 200 ml per gram of gel.

[0154] Purified IgG antibodies are dialyzed for 4 hours at 20±5° C. against 50 volumes of 500 mM sodium phosphate buffer (pH 7.5). The antibodies are then diluted in 500 mM phosphate buffer (pH 7.5) to a final concentration of 3 mg/ml.

[0155] IgG antibodies are mixed with the gel overnight at 5±3° C. The gel is packed into a chromatography column and is washed with 2 column volumes of 500 mM phosphate buffer (pH 7.5), and 1 column volume of 50 mM sodium phosphate buffer, containing 500 mM NaCl (pH 7.5). The gel is then transferred to a tube, mixed with 100 mM ethanolamine (pH 7.5) for 4 hours at room temperature, and washed twice with 2 column volumes of PBS. The gel is then stored in 1/10,000 PBS/merthiolate. The amount of IgG antibodies coupled to the gel is determined by measuring the optical density (OD) at 280 nm of the IgG solution and the direct eluate, plus washings.

[0156] 4.C. Adsorption and Elution of the Antigen

[0157] An antigen solution in 50 mM Tris-HCl (pH 8.0), 2 mM EDTA, for example, the supernatant or the solubilized pellet obtained using the methods described in 3.E., after centrifugation and filtration through a 0.45 μm membrane, is applied to a column equilibrated with 50 mM Tris-HCl (pH 8.0), 2 mM EDTA, at a flow rate of about 10 ml/hour. The column is then washed with 20 volumes of 50 mM Tris-HCl (pH 8.0), 2 mM EDTA. Alternatively, adsorption can be achieved by mixing overnight at 5±3° C.

[0158] The adsorbed gel is washed with 2 to 6 volumes of 10 mM sodium phosphate buffer (pH 6.8) and the antigen is eluted with 100 mM glycine buffer (pH 2.5). The eluate is recovered in 3 ml fractions, to each of which is added 150 μl of 1 M sodium phosphate buffer (pH 8.0). Absorption is measured at 280 nm for each fraction; those fractions containing the antigen are pooled and stored at −20° C.

[0159] Other embodiments are within the following claims.

What is claimed is:

1. An isolated polynucleotide that encodes:
(i) a polypeptide comprising an amino acid sequence that is homologous to the amino acid sequence of a Helicobacter polypeptide selected from the group consisting of GHPO7 (SEQ ID NO: 2), GHPO8 (SEQ ID NO: 4), GHPO9 (SEQ ID NO: 6), GHPO10 (SEQ ID NO: 8), GHPO12 (SEQ ID NO: 10), GHPO25 (SEQ ID NO: 12), GHPO27 (SEQ ID NO: 14), GHPO29 (SEQ ID NO: 16), GHPO30 (SEQ ID NO: 18), GHPO37 (SEQ ID NO: 20), GHPO49 (SEQ ID NO: 22), GHPO51 (SEQ ID NO: 24), GHPO54 (SEQ ID NO: 26), GHPO65 (SEQ ID NO: 28), GHPO66 (SEQ ID NO: 30), GHPO68 (SEQ ID NO: 32), GHPO70 (SEQ ID NO: 34), GHPO77 (SEQ ID NO: 36), GHPO83 (SEQ ID NO: 38), GHPO85 (SEQ ID NO: 40), GHPO87 (SEQ ID NO: 42), GHPO91 (SEQ ID NO: 44), GHPO92 (SEQ ID NO: 46), GHPO96 (SEQ ID NO: 48), GHPO97 (SEQ ID NO: 50), GHPO111 (SEQ ID NO: 52), GHPO115 (SEQ ID NO: 54), GHPO117 (SEQ ID NO: 56), GHPO123 (SEQ ID NO: 58), GHPO124 (SEQ ID NO: 60), GHPO126 (SEQ ID NO: 62), GHPO127 (SEQ ID NO: 64), GHPO128 (SEQ ID NO: 66), GHPO131 (SEQ ID NO: 68), GHPO133 (SEQ ID NO: 70), GHPO140 (SEQ ID NO: 72), GHPO141 (SEQ ID NO: 74), GHPO145 (SEQ ID NO: 76), GHPO147 (SEQ ID NO: 78), GHPO166 (SEQ ID NO: 80), GHPO181 (SEQ ID NO: 82), GHPO187 (SEQ ID NO: 84), GHPO188 (SEQ ID NO: 86), GHPO192 (SEQ ID NO: 88), GHPO202 (SEQ ID NO: 90), GHPO204 (SEQ ID NO: 92), GHPO205 (SEQ ID NO: 94), GHPO212 (SEQ ID NO: 96), GHPO218 (SEQ ID NO: 98), GHPO226 (SEQ ID NO: 100), GHPO231 (SEQ ID NO: 102), GHPO236 (SEQ ID NO: 104), GHPO239 (SEQ ID NO: 106), GHPO245 (SEQ ID NO: 108), GHPO246 (SEQ ID NO: 110), GHPO248 (SEQ ID NO: 112), GHPO253 (SEQ ID NO: 114), GHPO265 (SEQ ID NO: 116), GHPO266 (SEQ ID NO: 118), GHPO271 (SEQ ID NO: 120), GHPO272 (SEQ ID NO: 122), GHPO286 (SEQ ID NO: 124), GHPO291 (SEQ ID NO: 126), GHPO292 (SEQ ID NO: 128), GHPO297 (SEQ ID NO: 130), GHPO304 (SEQ ID NO: 132), GHPO307 (SEQ ID NO: 134), GHPO324 (SEQ ID NO: 136), GHPO326 (SEQ ID NO: 138), GHPO331 (SEQ ID NO: 140), GHPO343 (SEQ ID NO: 142), GHPO345 (SEQ ID NO: 144), GHPO346 (SEQ ID NO: 146), GHPO352 (SEQ ID NO: 148), GHPO355 (SEQ ID NO: 150), GHPO363 (SEQ ID NO: 152), GHPO369 (SEQ ID NO: 154), GHPO376 (SEQ ID NO: 156), GHPO378 (SEQ ID NO: 158), GHPO388 (SEQ ID NO: 160), GHPO396 (SEQ ID NO: 162), GHPO403 (SEQ ID NO: 164), GHPO410 (SEQ ID NO: 166), GHPO415 (SEQ ID NO: 168), GHPO421 (SEQ ID NO: 170), GHPO439 (SEQ ID NO: 172), GHPO441 (SEQ ID NO: 174), GHPO443 (SEQ ID NO: 176), GHPO453 (SEQ ID NO: 178), GHPO455 (SEQ ID NO: 180), GHPO464 (SEQ ID NO: 182), GHPO467 (SEQ ID NO: 184), GHPO468 (SEQ ID NO: 186), GHPO470 (SEQ ID NO: 188), GHPO486 (SEQ ID NO: 190), GHPO487 (SEQ ID NO: 192), GHPO488 (SEQ ID NO: 194), GHPO489 (SEQ ID NO: 196), GHPO498 (SEQ ID NO: 198), GHPO501 (SEQ ID NO: 200), GHPO504 (SEQ ID NO: 202), GHPO512 (SEQ ID NO: 204), GHPO517 (SEQ ID NO: 206), GHPO520 (SEQ ID NO: 208), GHPO528 (SEQ ID NO: 210), GHPO530 (SEQ ID NO: 212), GHPO532 (SEQ ID NO: 214), GHPO548 (SEQ ID NO: 216), GHPO561 (SEQ ID NO: 218), GHPO564 (SEQ ID NO: 220), GHPO572 (SEQ ID NO: 222), GHPO573 (SEQ ID NO: 224), GHPO574 (SEQ ID NO: 226), GHPO577 (SEQ ID NO: 228), GHPO579 (SEQ ID NO: 230), GHPO583 (SEQ ID NO: 232), GHPO588 (SEQ ID NO: 234), GHPO593 (SEQ ID NO: 236), GHPO597 (SEQ ID NO: 238), GHPO598 (SEQ ID NO: 240), GHPO604 (SEQ ID NO: 242), GHPO606 (SEQ ID NO: 244), GHPO611 (SEQ ID NO: 246), GHPO612 (SEQ ID NO: 248), GHPO615 (SEQ ID NO: 250), GHPO632 (SEQ ID NO: 252), GHPO633 (SEQ ID NO: 254), GHPO637 (SEQ ID NO: 256), GHPO651 (SEQ ID NO: 258), GHPO663 (SEQ ID NO: 260), GHPO686 (SEQ ID NO: 262), GHPO693 (SEQ ID NO: 264), GHPO698 (SEQ ID NO: 266), GHPO703 (SEQ ID NO: 268), GHPO704 (SEQ ID NO: 270), GHPO705 (SEQ ID NO: 272), GHPO707 (SEQ ID NO: 274), GHPO721 (SEQ ID NO: 276), GHPO727 (SEQ ID NO: 278), GHPO728 (SEQ ID NO: 280), GHPO733 (SEQ ID NO: 282), GHPO758 (SEQ ID NO: 284), GHPO763 (SEQ ID NO: 286), GHPO771 (SEQ ID NO: 288), GHPO774 (SEQ ID NO: 290), GHPO776 (SEQ ID NO: 292), GHPO783 (SEQ ID NO: 294), GHPO800 (SEQ ID NO: 296), GHPO806 (SEQ ID NO: 298), GHPO807 (SEQ ID NO: 300), GHPO808 (SEQ ID NO: 302), GHPO809 (SEQ ID NO: 304), GHPO811 (SEQ ID NO: 306), GHPO815 (SEQ ID NO: 308), GHPO819 (SEQ ID NO: 310), GHPO841 (SEQ ID NO: 312), GHPO843 (SEQ ID NO: 314), GHPO846 (SEQ ID NO: 316), GHPO875 (SEQ ID NO: 318), GHPO892 (SEQ ID NO: 320), GHPO902 (SEQ ID NO: 322), GHPO904 (SEQ ID NO: 324), GHPO906 (SEQ ID NO: 326), GHPO908 (SEQ ID NO: 328), GHPO921 (SEQ ID NO: 330), GHPO923 (SEQ ID NO: 332), GHPO926 (SEQ ID NO: 334), GHPO933 (SEQ ID NO: 336), GHPO939 (SEQ ID NO: 338), GHPO940 (SEQ ID NO: 340), GHPO943 (SEQ ID NO: 342), GHPO951 (SEQ ID NO: 344), GHPO961 (SEQ ID NO: 346), GHPO965 (SEQ ID NO: 348), GHPO990 (SEQ ID NO: 350), GHPO991 (SEQ ID NO: 352), GHPO998 (SEQ ID NO: 354), GHPO1001 (SEQ ID NO: 356), GHPO1005 (SEQ ID NO: 358), GHPO1033 (SEQ ID NO: 360), GHPO1039 (SEQ ID NO: 362), GHPO1041 (SEQ ID NO: 364), GHPO1043 (SEQ ID NO: 366), GHPO1044 (SEQ ID NO: 368), GHPO1051 (SEQ ID NO: 370), GHPO1058 (SEQ ID NO: 372), GHPO1060 (SEQ ID NO: 374), GHPO1075 (SEQ ID NO: 376), GHPO1077 (SEQ ID NO: 378), GHPO1082 (SEQ ID NO: 380), GHPO1083 (SEQ ID NO: 382), GHPO1086 (SEQ ID NO: 384), GHPO1087 (SEQ ID NO: 386), GHPO1090 (SEQ ID NO: 388), GHPO1097 (SEQ ID NO: 390), GHPO1098 (SEQ ID NO: 392), GHPO1103 (SEQ ID NO: 394), GHPO1113 (SEQ ID NO: 396), GHPO1116 (SEQ ID NO: 398), GHPO1123 (SEQ ID NO: 400), GHPO1125 (SEQ ID NO: 402), GHPO1129 (SEQ ID NO: 404), GHPO1130 (SEQ ID NO: 406), GHPO1134 (SEQ ID NO: 408), GHPO1161 (SEQ ID NO: 410), GHPO1166 (SEQ ID NO: 412), GHPO1170 (SEQ ID NO: 414), GHPO1175 (SEQ ID NO: 416), GHPO1181 (SEQ ID NO: 418), GHPO1186 (SEQ ID NO: 420), GHPO1188 (SEQ ID NO: 422), GHPO1191 (SEQ ID NO: 424), GHPO1193 (SEQ ID NO: 426), GHPO1196 (SEQ ID NO: 428), GHPO1204 (SEQ ID NO: 430), GHPO1210 (SEQ ID NO: 432), GHPO1211 (SEQ ID NO: 434), GHPO1216 (SEQ ID NO: 436), GHPO1218 (SEQ ID NO: 438), GHPO1220 (SEQ ID NO: 440), GHPO1223 (SEQ ID NO: 442), GHPO1226 (SEQ ID NO: 444), GHPO1240 (SEQ ID NO: 446), GHPO1246 (SEQ ID NO: 448), GHPO1251 (SEQ ID NO: 450), GHPO1252 (SEQ ID NO: 452), GHPO1261 (SEQ ID NO: 454), GHPO1265 (SEQ ID NO: 456), GHPO1267 (SEQ ID NO: 458), GHPO1278 (SEQ ID NO: 460), GHPO1282 (SEQ ID NO: 462), GHPO1283 (SEQ ID NO: 464), GHPO1287 (SEQ ID NO: 466), GHPO1292 (SEQ ID NO: 468), GHPO1293 (SEQ ID NO: 470), GHPO1302 (SEQ ID NO: 472), GHPO1309 (SEQ ID NO: 474), GHPO1317 (SEQ ID NO: 476), GHPO1318 (SEQ ID NO: 478), GHPO1321 (SEQ ID NO: 480), GHPO1325 (SEQ ID NO: 482), GHPO1341 (SEQ ID NO: 484), GHPO1351 (SEQ ID NO: 486), GHPO1354 (SEQ ID NO: 488), GHPO1363 (SEQ ID NO: 490), GHPO1371 (SEQ ID NO: 492), GHPO1381 (SEQ ID NO: 494), GHPO1401 (SEQ ID NO: 496), GHPO1402 (SEQ ID NO: 498), GHPO1403 (SEQ ID NO: 500), GHPO1408 (SEQ ID NO: 502), GHPO1416 (SEQ ID NO: 504), GHPO1420 (SEQ ID NO: 506), GHPO1428 (SEQ ID NO: 508), GHPO1437 (SEQ ID NO: 510), GHPO1439 (SEQ ID NO: 512), GHPO1460 (SEQ ID NO: 514), GHPO1463 (SEQ ID NO: 516), GHPO1472 (SEQ ID NO: 518), GHPO1474 (SEQ ID NO: 520), GHPO1484 (SEQ ID NO: 522), GHPO1489 (SEQ ID NO: 524), GHPO1494 (SEQ ID NO: 526), GHPO1495 (SEQ ID NO: 528), GHPO1498 (SEQ ID NO: 530), GHPO1499 (SEQ ID NO: 532), GHPO1500 (SEQ ID NO: 534), GHPO1503 (SEQ ID NO: 536), GHPO1504 (SEQ ID NO: 538), GHPO1510 (SEQ ID NO: 540), GHPO1518 (SEQ ID NO: 542), GHPO1533 (SEQ ID NO: 544), GHPO1541 (SEQ ID NO: 546), GHPO1544 (SEQ ID NO: 548), GHPO1548 (SEQ ID NO: 550), GHPO1565 (SEQ ID NO: 552), GHPO1575 (SEQ ID NO: 554), GHPO1582 (SEQ ID NO: 556), GHPO1595 (SEQ ID NO: 558), GHPO1597 (SEQ ID NO: 560), GHPO1599 (SEQ ID NO: 562), GHPO1601 (SEQ ID NO: 564), GHPO1609 (SEQ ID NO: 566), GHPO1613 (SEQ ID NO: 568), GHPO1614 (SEQ ID NO: 570), GHPO1626 (SEQ ID NO: 572), GHPO1628 (SEQ ID NO: 574), GHPO1639 (SEQ ID NO: 576), GHPO1640 (SEQ ID NO: 578), GHPO1641 (SEQ ID NO: 580), GHPO1646 (SEQ ID NO: 582), GHPO1662 (SEQ ID NO: 584), GHPO1667 (SEQ ID NO: 586), GHPO1668 (SEQ ID NO: 588), GHPO1670 (SEQ ID NO: 590), GHPO1671 (SEQ ID NO: 592), GHPO1672 (SEQ ID NO: 594), GHPO1678 (SEQ ID NO: 596), GHPO1684 (SEQ ID NO: 598), GHPO1695 (SEQ ID NO: 600), GHPO1697 (SEQ ID NO: 602), GHPO1701 (SEQ ID NO: 604), GHPO1719 (SEQ ID NO: 606), GHPO1723 (SEQ ID NO: 608), GHPO1732 (SEQ ID NO: 610), GHPO1739 (SEQ ID NO: 612), GHPO1741 (SEQ ID NO: 614), GHPO1747 (SEQ ID NO: 616), GHPO1749 (SEQ ID NO: 618), GHPO1750 (SEQ ID NO: 620), GHPO1751 (SEQ ID NO: 622), GHPO1755 (SEQ ID NO: 624), GHPO1771 (SEQ ID NO: 626), GHPO1786 (SEQ ID NO: 628), and GHPO1789 (SEQ ID NO: 630); or
(ii) a derivative of said Helicobacter polypeptide.

2. The isolated polynucleotide of claim 1, which encodes a mature form of said Helicobacter polypeptide.

3. The isolated polynucleotide of claim 1, wherein the polynucleotide is a DNA molecule.

4. The isolated polynucleotide of claim 1, which is a DNA molecule that can be amplified by polymerase chain reaction from a Helicobacter genome.

5. The isolated DNA molecule of claim 4, which can be amplified by the polymerase chain reaction from a Helicobacter pylori genome.

6. The isolated polynucleotide of claim 1, which is a DNA molecule that encodes the mature form or a derivative of a polypeptide encoded by the DNA molecule of claim 4.

7. The isolated polynucleotide of claim 1, which is a DNA molecule that encodes the mature form or a derivative of a polypeptide encoded by the DNA molecule of claim 5.

8. A compound, in a substantially purified form, that is the mature form or a derivative of a polypeptide comprising an amino acid sequence that is homologous to a Helicobacter polypeptide selected from the group consisting of GHPO7 (SEQ ID NO: 2), GHPO8 (SEQ ID NO: 4), GHPO9 (SEQ ID NO: 6), GHPO10 (SEQ ID NO: 8), GHPO12 (SEQ ID NO: 10), GHPO25 (SEQ ID NO: 12), GHPO27 (SEQ ID NO: 14), GHPO29 (SEQ ID NO: 16), GHPO30 (SEQ ID NO: 18), GHPO37 (SEQ ID NO: 20), GHPO49 (SEQ ID NO: 22), GHPO51 (SEQ ID NO: 24), GHPO54 (SEQ ID NO: 26), GHPO65 (SEQ ID NO: 28), GHPO66 (SEQ ID NO: 30), GHPO68 (SEQ ID NO: 32), GHPO70 (SEQ ID NO: 34), GHPO77 (SEQ ID NO: 36), GHPO83 (SEQ ID NO: 38), GHPO85 (SEQ ID NO: 40), GHPO87 (SEQ ID NO: 42), GHPO91 (SEQ ID NO: 44), GHPO92 (SEQ ID NO: 46), GHPO96 (SEQ ID NO: 48), GHPO97 (SEQ ID NO: 50), GHPO111 (SEQ ID NO: 52), GHPO115 (SEQ ID NO: 54), GHPO117 (SEQ ID NO: 56), GHPO123 (SEQ ID NO: 58), GHPO124 (SEQ ID NO: 60), GHPO126 (SEQ ID NO: 62), GHPO127 (SEQ ID NO: 64), GHPO128 (SEQ ID NO: 66), GHPO131 (SEQ ID NO: 68), GHPO133 (SEQ ID NO: 70), GHPO140 (SEQ ID NO: 72), GHPO141 (SEQ ID NO: 74), GHPO145 (SEQ ID NO: 76), GHPO147 (SEQ ID NO: 78), GHPO166 (SEQ ID NO: 80), GHPO181 (SEQ ID NO: 82), GHPO187 (SEQ ID NO: 84), GHPO188 (SEQ ID NO: 86), GHPO192 (SEQ ID NO: 88), GHPO202 (SEQ ID NO: 90), GHPO204 (SEQ ID NO: 92), GHPO205 (SEQ ID NO: 94), GHPO212 (SEQ ID NO: 96), GHPO218 (SEQ ID NO: 98), GHPO226 (SEQ ID NO: 100), GHPO231 (SEQ ID NO: 102), GHPO236 (SEQ ID NO: 104), GHPO239 (SEQ ID NO: 106), GHPO245 (SEQ ID NO: 108), GHPO246 (SEQ ID NO: 110), GHPO248 (SEQ ID NO: 112), GHPO253 (SEQ ID NO: 114), GHPO265 (SEQ ID NO: 116), GHPO266 (SEQ ID NO: 118), GHPO271 (SEQ ID NO: 120), GHPO272 (SEQ ID NO: 122), GHPO286 (SEQ ID NO: 124), GHPO291 (SEQ ID NO: 126), GHPO292 (SEQ ID NO: 128), GHPO297 (SEQ ID NO: 130), GHPO304 (SEQ ID NO: 132), GHPO307 (SEQ ID NO: 134), GHPO324 (SEQ ID NO: 136), GHPO326 (SEQ ID NO: 138), GHPO331 (SEQ ID NO: 140), GHPO343 (SEQ ID NO: 142), GHPO345 (SEQ ID NO: 144), GHPO346 (SEQ ID NO: 146), GHPO352 (SEQ ID NO: 148), GHPO355 (SEQ ID NO: 150), GHPO363 (SEQ ID NO: 152), GHPO369 (SEQ ID NO: 154), GHPO376 (SEQ ID NO: 156), GHPO378 (SEQ ID NO: 158), GHPO388 (SEQ ID NO: 160), GHPO396 (SEQ ID NO: 162), GHPO403 (SEQ ID NO: 164), GHPO410 (SEQ ID NO: 166), GHPO415 (SEQ ID NO: 168), GHPO421 (SEQ ID NO: 170), GHPO439 (SEQ ID NO: 172), GHPO441 (SEQ ID NO: 174), GHPO443 (SEQ ID NO: 176), GHPO453 (SEQ ID NO: 178), GHPO455 (SEQ ID NO: 180), GHPO464 (SEQ ID NO: 182), GHPO467 (SEQ ID NO: 184), GHPO468 (SEQ ID NO: 186), GHPO470 (SEQ ID NO: 188), GHPO486 (SEQ ID NO: 190), GHPO487 (SEQ ID NO: 192), GHPO488 (SEQ ID NO: 194), GHPO489 (SEQ ID NO: 196), GHPO498 (SEQ ID NO: 198), GHPO501 (SEQ ID NO: 200), GHPO504 (SEQ ID NO: 202), GHPO512 (SEQ ID NO: 204), GHPO517 (SEQ ID NO: 206), GHPO520 (SEQ ID NO: 208), GHPO528 (SEQ ID NO: 210), GHPO530 (SEQ ID NO: 212), GHPO532 (SEQ ID NO: 214), GHPO548 (SEQ ID NO: 216), GHPO561 (SEQ ID NO: 218), GHPO564 (SEQ ID NO: 220), GHPO572 (SEQ ID NO: 222), GHPO573 (SEQ ID NO: 224), GHPO574 (SEQ ID NO: 226), GHPO577 (SEQ ID NO: 228), GHPO579 (SEQ ID NO: 230), GHPO583 (SEQ ID NO: 232), GHPO588 (SEQ ID NO: 234), GHPO593 (SEQ ID NO: 236), GHPO597 (SEQ ID NO: 238), GHPO598 (SEQ ID NO: 240), GHPO604 (SEQ ID NO: 242), GHPO606 (SEQ ID NO: 244), GHPO611 (SEQ ID NO: 246), GHPO612 (SEQ ID NO: 248), GHPO615 (SEQ ID NO: 250), GHPO632 (SEQ ID NO: 252), GHPO633 (SEQ ID NO: 254), GHPO637 (SEQ ID NO: 256), GHPO651 (SEQ ID NO: 258), GHPO663 (SEQ ID NO: 260), GHPO686 (SEQ ID NO: 262), GHPO693 (SEQ ID NO: 264), GHPO698 (SEQ ID NO: 266), GHPO703 (SEQ ID NO: 268), GHPO704 (SEQ ID NO: 270), GHPO705 (SEQ ID NO: 272), GHPO707 (SEQ ID NO: 274), GHPO721 (SEQ ID NO: 276), GHPO727 (SEQ ID NO: 278), GHPO728 (SEQ ID NO: 280), GHPO733 (SEQ ID NO: 282), GHPO758 (SEQ ID NO: 284), GHPO763 (SEQ ID NO: 286), GHPO771 (SEQ ID NO: 288), GHPO774 (SEQ ID NO: 290), GHPO776 (SEQ ID NO: 292), GHPO783 (SEQ ID NO: 294), GHPO800 (SEQ ID NO: 296), GHPO806 (SEQ ID NO: 298), GHPO807 (SEQ ID NO: 300), GHPO808 (SEQ ID NO: 302), GHPO809 (SEQ ID NO: 304), GHPO811 (SEQ ID NO: 306), GHPO815 (SEQ ID NO: 308), GHPO819 (SEQ ID NO: 310), GHPO841 (SEQ ID NO: 312), GHPO843 (SEQ ID NO: 314), GHPO846 (SEQ ID NO: 316), GHPO875 (SEQ ID NO: 318), GHPO892 (SEQ ID NO: 320), GHPO902 (SEQ ID NO: 322), GHPO904 (SEQ ID NO: 324), GHPO906 (SEQ ID NO: 326), GHPO908 (SEQ ID NO: 328), GHPO921 (SEQ ID NO: 330), GHPO923 (SEQ ID NO: 332), GHPO926 (SEQ ID NO: 334), GHPO933 (SEQ ID NO: 336), GHPO939 (SEQ ID NO: 338), GHPO940 (SEQ ID NO: 340), GHPO943 (SEQ ID NO: 342), GHPO951 (SEQ ID NO: 344), GHPO961 (SEQ ID NO: 346), GHPO965 (SEQ ID NO: 348), GHPO990 (SEQ ID NO: 350), GHPO991 (SEQ ID NO: 352), GHPO998 (SEQ ID NO: 354), GHPO1001 (SEQ ID NO: 356), GHPO1005 (SEQ ID NO: 358), GHPO1033 (SEQ ID NO: 360), GHPO1039 (SEQ ID NO: 362), GHPO1041 (SEQ ID NO: 364), GHPO1043 (SEQ ID NO: 366), GHPO1044 (SEQ ID NO: 368), GHPO1051 (SEQ ID NO: 370), GHPO1058 (SEQ ID NO: 372), GHPO1060 (SEQ ID NO: 374), GHPO1075 (SEQ ID NO: 376), GHPO1077 (SEQ ID NO: 378), GHPO1082 (SEQ ID NO: 380), GHPO1083 (SEQ ID NO: 382), GHPO1086 (SEQ ID NO: 384), GHPO1087 (SEQ ID NO: 386), GHPO1090 (SEQ ID NO: 388), GHPO1097 (SEQ ID NO: 390), GHPO1098 (SEQ ID NO: 392), GHPO1103 (SEQ ID NO: 394), GHPO1113 (SEQ ID NO: 396), GHPO1116 (SEQ ID NO: 398), GHPO1123 (SEQ ID NO: 400), GHPO1125 (SEQ ID NO: 402), GHPO1129 (SEQ ID NO: 404), GHPO1130 (SEQ ID NO: 406), GHPO1134 (SEQ ID NO: 408), GHPO1161 (SEQ ID NO: 410), GHPO1166 (SEQ ID NO: 412), GHPO1170 (SEQ ID NO: 414), GHPO1175 (SEQ ID NO: 416), GHPO1181 (SEQ ID NO: 418), GHPO1186 (SEQ ID NO: 420), GHPO1188 (SEQ ID NO: 422), GHPO1191 (SEQ ID NO: 424), GHPO1193 (SEQ ID NO: 426), GHPO1196 (SEQ ID NO: 428), GHPO1204 (SEQ ID NO: 430), GHPO1210 (SEQ ID NO: 432), GHPO1211 (SEQ ID NO: 434), GHPO1216 (SEQ ID NO: 436), GHPO1218 (SEQ ID NO: 438), GHPO1220 (SEQ ID NO: 440), GHPO1223 (SEQ ID NO: 442), GHPO1226 (SEQ ID NO: 444), GHPO1240 (SEQ ID NO: 446), GHPO1246 (SEQ ID NO: 448), GHPO1251 (SEQ ID NO: 450), GHPO1252 (SEQ ID NO: 452), GHPO1261 (SEQ ID NO: 454), GHPO1265 (SEQ ID NO: 456), GHPO1267 (SEQ ID NO: 458), GHPO1278 (SEQ ID NO: 460), GHPO1282 (SEQ ID NO: 462), GHPO1283 (SEQ ID NO: 464), GHPO1287 (SEQ ID NO: 466), GHPO1292 (SEQ ID NO: 468), GHPO1293 (SEQ ID NO: 470), GHPO1302 (SEQ ID NO: 472), GHPO1309 (SEQ ID NO: 474), GHPO1317 (SEQ ID NO: 476), GHPO1318 (SEQ ID NO: 478), GHPO1321 (SEQ ID NO: 480), GHPO1325 (SEQ ID NO: 482), GHPO1341 (SEQ ID NO: 484), GHPO1351 (SEQ ID NO: 486), GHPO1354 (SEQ ID NO: 488), GHPO1363 (SEQ ID NO: 490), GHPO1371 (SEQ ID NO: 492), GHPO1381 (SEQ ID NO: 494), GHPO1401 (SEQ ID NO: 496), GHPO1402 (SEQ ID NO: 498), GHPO1403 (SEQ ID NO: 500), GHPO1408 (SEQ ID NO: 502), GHPO1416 (SEQ ID NO: 504), GHPO1420 (SEQ ID NO: 506), GHPO1428 (SEQ ID NO: 508), GHPO1437 (SEQ ID NO: 510), GHPO1439 (SEQ ID NO: 512), GHPO1460 (SEQ ID NO: 514), GHPO1463 (SEQ ID NO: 516), GHPO1472 (SEQ ID NO: 518), GHPO1474 (SEQ ID NO: 520), GHPO1484 (SEQ ID NO: 522), GHPO1489 (SEQ ID NO: 524), GHPO1494 (SEQ ID NO: 526), GHPO1495 (SEQ ID NO: 528), GHPO1498 (SEQ ID NO: 530), GHPO1499 (SEQ ID NO: 532), GHPO1500 (SEQ ID NO: 534), GHPO1503 (SEQ ID NO: 536), GHPO1504 (SEQ ID NO: 538), GHPO1510 (SEQ ID NO: 540), GHPO1518 (SEQ ID NO: 542), GHPO1533 (SEQ ID NO: 544), GHPO1541 (SEQ ID NO: 546), GHPO1544 (SEQ ID NO: 548), GHPO1548 (SEQ ID NO: 550), GHPO1565 (SEQ ID NO: 552), GHPO1575 (SEQ ID NO: 554), GHPO1582 (SEQ ID NO: 556), GHPO1595 (SEQ ID NO: 558), GHPO1597 (SEQ ID NO: 560), GHPO1599 (SEQ ID NO: 562), GHPO1601 (SEQ ID NO: 564), GHPO1609 (SEQ ID NO: 566), GHPO1613 (SEQ ID NO: 568), GHPO1614 (SEQ ID NO: 570), GHPO1626 (SEQ ID NO: 572), GHPO1628 (SEQ ID NO: 574), GHPO1639 (SEQ ID NO: 576), GHPO1640 (SEQ ID NO: 578), GHPO1641 (SEQ ID NO: 580), GHPO1646 (SEQ ID NO: 582), GHPO1662 (SEQ ID NO: 584), GHPO1667 (SEQ ID NO: 586), GHPO1668 (SEQ ID NO: 588), GHPO1670 (SEQ ID NO: 590), GHPO1671 (SEQ ID NO: 592), GHPO1672 (SEQ ID NO: 594), GHPO1678 (SEQ ID NO: 596), GHPO1684 (SEQ ID NO: 598), GHPO1695 (SEQ ID NO: 600), GHPO1697 (SEQ ID NO: 602), GHPO1701 (SEQ ID NO: 604), GHPO1719 (SEQ ID NO: 606), GHPO1723 (SEQ ID NO: 608), GHPO1732 (SEQ ID NO: 610), GHPO1739 (SEQ ID NO: 612), GHPO1741 (SEQ ID NO: 614), GHPO1747 (SEQ ID NO: 616), GHPO1749 (SEQ ID NO: 618), GHPO1750 (SEQ ID NO: 620), GHPO1751 (SEQ ID NO: 622), GHPO1755 (SEQ ID NO: 624), GHPO1771 (SEQ ID NO: 626), GHPO1786 (SEQ ID NO: 628), and GHPO1789 (SEQ ID NO: 630); or
(ii) a derivative of said Helicobacter polypeptide.

9. The compound of claim 8, which is the mature form or a derivative of a polypeptide encoded by a DNA molecule of claim 4.

10. The compound of claim 8, which is the mature form or a derivative of a polypeptide encoded by a DNA molecule of claim 5.

11. A method of preventing or treating Helicobacter infection in a mammal, said method comprising administering to said mammal a prophylactically or therapeutically effective amount of a compound of claim 8.

12. The method of claim 11, further comprising administering to said mammal an antibiotic, an antisecretory agent, a bismuth salt, or a combination thereof.

13. The method of claim 12, wherein said antibiotic is selected from the group consisting of amoxicillin, clarithromycin, tetracycline, metronidizole, and erythromycin.

14. The method of claim 12, wherein said bismuth salt is selected from the group consisting of bismuth subcitrate and bismuth subsalicylate.

15. The method of claim 12, wherein said antisecretory agent is a proton pump inhibitor.

16. The method of claim 15, wherein said proton pump inhibitor is selected from the group consisting of omeprazole, lansoprazole, and pantoprazole.

17. The method of claim 12, wherein said antisecretory agent is an H₂-receptor antagonist.

18. The method of claim 17, wherein said H₂-receptor antagonist is selected from the group consisting of ranitidine, cimetidine, famotidine, nizatidine, and roxatidine.

19. The method of claim 12, wherein said antisecretory agent is a prostaglandin analog.

20. The method of claim 19, wherein said prostaglandin analog is misoprostil or enprostil.

21. The method of claim 11, further comprising administering to said mammal a prophylactically or therapeutically effective amount of a second Helicobacter polypeptide or a derivative thereof.

22. The method of claim 21, wherein the second Helicobacter polypeptide is a Helicobacter urease, or a subunit or a derivative thereof.

23. A composition comprising a compound of claim 8, together with a physiologically acceptable diluent or carrier.

24. The composition of claim 23, further comprising an adjuvant.

25. The composition of claim 23, further comprising a second Helicobacter polypeptide or a derivative thereof.

26. The composition of claim 25, wherein said second Helicobacter polypeptide is a Helicobacter urease, or a subunit or a derivative thereof.

27. A method of preventing or treating Helicobacter infection in a mammal, said method comprising administering to said mammal a prophylactically or therapeutically effective amount of a polynucleotide of claim 1.

28. A method of preventing or treating Helicobacter infection in a mammal, said method comprising administering to said mammal a prophylactically or therapeutically effective amount of a polynucleotide of claim 4.

29. A method of preventing or treating Helicobacter infection in a mammal, said method comprising administering to said mammal a prophylactically or therapeutically effective amount of a polynucleotide of claim 7.

30. A composition comprising a viral vector, in the genome of which is inserted a DNA molecule of claim 3, said DNA molecule being placed under conditions for expression in a mammalian cell and said viral vector being admixed with a physiologically acceptable diluent or carrier.

31. The composition of claim 30, wherein said viral vector is a poxvirus.

32. A composition that comprises a bacterial vector comprising a DNA molecule of claim 3, said DNA molecule being placed under conditions for expression and said bacterial vector being admixed with a physiologically acceptable diluent or carrier.

33. The composition of claim 32, wherein said vector is selected from the group consisting of Shigella, Salmonella, Vibrio cholerae, Lactobacillus, Bacille bilié de Calmette-Guérin, and Streptococcus.

34. A composition comprising a polynucleotide of claim 1, together with a physiologically acceptable diluent or carrier.

35. The composition of claim 34, wherein said polynucleotide is a DNA molecule that is inserted in a plasmid that is unable to replicate and to substantially integrate in a mammalian genome and is placed under conditions for expression in a mammalian cell.

36. An expression cassette comprising a DNA molecule of claim 3, said DNA molecule being placed under conditions for expression in a procaryotic or eucaryotic cell.

37. A process for producing a compound of claim 8, which comprises culturing a procaryotic or eucaryotic cell transformed or transfected with an expression cassette of claim 36, and recovering said compound from the cell culture.

38. A method of preventing or treating Helicobacter infection in a mammal, said method comprising administering to said mammal a prophylactically or therapeutically effective amount of an antibody that binds to the compound of claim 8.

The application's sequence listing, which the Patent Office published only in electronic form, follows.

SEQUENCE LISTING (638 sequences)

SEQ ID NO: 1 - DNA, 1613 bp, Helicobacter pylori
  CDS (64)...(1551)
taagaaaaaccgctagagtgcaatacaattcttgaaagatatgaaattaaaaaaggagactttatgttaaaaatcaaattagaaaaaaccacttttgaaaacgcaaaagctgaatgcagtttagtttttattatcaataaggattttagccacgcttgggtcaaaaataaagagttgctagaaacctttaaatacgaaggcgaaggcgtatttttagaccaagaaaataaaatcctgtatgcgggcgttaaagaagatgatgtgcatttattgagagagagcgcgtgtttagccgttcgcacccttaaaaaactcgcttttaaaagcgttaaagtgggcgtttatacttgtggtgcacattctaaagataacgcgcttttagaaaacttgaaagcgctgtttttgggcttgaaattaggtttgtatgaatacgacacttttaaatccaacaaaaaagaaagcgttttaaaagaagccattgtcgctttagaattgcacaaaccttgcgaaaaaacttgcgcaaattctttagaaaagagtgctaaagaagcgttaaaatacgctgaaatcatgacagaaagcttgaatatcgttaaagatctagtcaataccccccctatgattggcactccggtttatatggctgaagtggcgcaaaaagtggctaaagaaaaccatttagaaatccatgttcatgatgaaaaatttttagaagaaaagaaaatgaacgcctttttagcggtcaataaagcctctcttagcgtcaatcctcctcgcttgatccatttagtctataagcctaaaaaagcgaagaaaaaaatcgctttagtgggtaagggcttgacttatgattgtgggggtttgagcttgaaaccggccgattacatggttactatgaaagcggataaaggcggtggctctgcggtgattgggcttttaaacgcattagccaaactaggcgtggaggctgaagtgcatggcattattggggctacagaaaacatgataggcccagccgcttataaaccagatgatattttgatctccaaagaaggcaagagcatagaggtccgtaataccgacgctgaggggcgtttggttttagcggattgtttgagctacgctcaagatttaaaccctgatgtgatcgtggattttgcgacccttactggggcatgcgttgtaggcttaggcgaattcacttcagcgatcatggggcataatgaagagttaaaaaacctctttgaaacttcagggttagaatccggcgaattattagccaaactcccctttaaccgccatttaaagaaattgattgaatctaaaatcgctgatgtgtgcaatatttcttcttcacgctatggcggtgcgatcacagcgggcttgtttttaaatgaatttattagagatgagtttaaggataagtggctacacattgacattgcaggccctgcttatgtggaaaaagaatgggatgtgaatagctttggagcgagtggggctggcgtgagagcttgcacagcttttgtggaagagcttttgaaaaaggcttgaaatgggcttgtctgtaggcattgtgggtttgcctaatgtgggcaaatccagcaccttta

SEQ ID NO: 2 - protein, 496 aa, Helicobacter pylori
MLKIKLEKTTFENAKAECSLVFIINKDFSHAWVKNKELLETFKYEGEGVFLDQENKILYAGVKEDDVHLLRESACLAVRTLKKLAFKSVKVGVYTCGAHSKDNALLENLKALFLGLKLGLYEYDTFKSNKKESVLKEAIVALELHKPCEKTCANSLEKSAKEALKYAEIMTESLNIVKDLVNTPPMIGTPVYMAEVAQKVAKENHLEIHVHDEKFLEEKKMNAFLAVNKASLSVNPPRLIHLVYKPKKAKKKIALVGKGLTYDCGGLSLKPADYMVTMKADKGGGSAVIGLLNALAKLGVEAEVHGIIGATENMIGPAAYKPDDILISKEGKSIEVRNTDAEGRLVLADCLSYAQDLNPDVIVDFATLTGACVVGLGEFTSAIMGHNEELKNLFETSGLESGELLAKLPFNRHLKKLIESKIADVCNISSSRYGGAITAGLFLNEFIRDEFKDKWLHIDIAGPAYVEKEWDVNSFGASGAGVRACTAFVEELLKKA

SEQ ID NO: 3 - DNA, 560 bp, Helicobacter pylori
  CDS (49)...(492)
ggcgaaatcgggttaattttagcagggattgccagctataccggtcatatgcatttagggttagccattttagtcgcagggattgggggctttgtgggggatcagatctatttttacatcggccgcaccaataaagcttacatccaaaaaaagctagaaaaacaacgccgaaaactagccctagcccatttattgttgcaaaaacacggctggtttatcatttttatccaacgctatatgtatggcatgcgcaccatcattcccattagcataggtctcacgcgttatagcgctttaaaattcgctatcatcaatctcattagcgcgatggtgtgggcgagcattaccattattctagcgtggtatttaggagaagagttattgcatgcgttagggtggcttaaaaaacacccttatgcgctaatattactattagtatctttcttggcgttagtgctgtggtatttccaatactatagtaagaaaaaccgctagagtgcaatacaattcttgaaagatatgaaattaaaaaaggagactttatgttaaaaatcaaatta

SEQ ID NO: 4 - protein, 148 aa, Helicobacter pylori
MHLGLAILVAGIGGFVGDQIYFYIGRTNKAYIQKKLEKQRRKLALAHLLLQKHGWFIIFIQRYMYGMRTIIPISIGLTRYSALKFAIINLISAMVWASITIILAWYLGEELLHALGWLKKHPYALILLLVSFLALVLWYFQYYSKKNR

SEQ ID NO: 5 - DNA, 609 bp, Helicobacter pylori
  CDS (61)...(600)
taaaaacgctataataaatcaaaattctacaaccaatccgttatattaaaggaaatcaaaatgaatgaaacgctcaaagaagaacttttacaaagcatcagagaagtgaaagactaccctaaaaaagggattttattcaaagacattaccacgctactcaactaccctaaactctttaacaaactcattgacacgctcaaaaaacgctatctcgctctcaatatagactttatcgtgggcattgaagcgagagggtttattttaggctctgctctcgcttatgcgcttggggtgggttttgtgcctgtgaggaaaaagggcaaactccccgcacacaccctatctcaaagctacagcctagaatacgggagcgacagcatagaaatccactccgacgcttttaggggaattaagggggtaagggtggtgttgattgatgatttattagccactggaggcacagctttagcgagccttgagcttatcaaagccctacaagccgaatgcatagaagcatgctttttgatagggttaaaagaattaccgggtatccaacttttagaagaacgcgtgaaaaccttttgtttgttagagttagaataagggtga

SEQ ID NO: 6 - protein, 180 aa, Helicobacter pylori
MNETLKEELLQSIREVKDYPKKGILFKDITTLLNYPKLFNKLIDTLKKRYLALNIDFIVGIEARGFILGSALAYALGVGFVPVRKKGKLPAHTLSQSYSLEYGSDSIEIHSDAFRGIKGVRVVLIDDLLATGGTALASLELIKALQAECIEACFLIGLKELPGIQLLEERVKTFCLLELE

SEQ ID NO: 7 - DNA, 374 bp, Helicobacter pylori
  CDS (28)...(357)
tttcgctaaaaaggatattttaacagaatgtttacccaatggtttattctcactatcgctattgtttttatcctttatatgggtgtgcgcactttcttttttaaaaccgtggctaaacggcaagaacgcaccaacgcatccatgaagctcaccttacaagaagctgaaattttgatccaaaaacaccagttgcaactccaaagggctttgggcaatattgatattctcacccaagaaatgagctcgttaaaaacagaactaaaagcccttaaacagcgcaactctgaatacaaaggcgaatcggataaatataaaaatcgtattaaagaattggagcaaaaaatagaagctctcctttaaaaacgctataataa

SEQ ID NO: 8 - protein, 110 aa, Helicobacter pylori
MFTQWFILTIAIVFILYMGVRTFFFKTVAKRQERTNASMKLTLQEAEILIQKHQLQLQRALGNIDILTQEMSSLKTELKALKQRNSEYKGESDKYKNRIKELEQKIEALL

SEQ ID NO: 9 - DNA, 778 bp, Helicobacter pylori
  CDS (78)...(728)
aaaaaagaaaacgcaacgcattaaggttttttgtgcaattttttgatttctctttagaaagttttattaccaccttaatgaaaatcctagcccttttaatcgctatcatagggcatgagatcatgcatggcttgagcgcgtttttatttggggataggagcactaaagacgctaggcgtttgagtttaaaccctatcaggcatttagacatgatgggttcggtgcttttaccggctttattactcatttttcaagccccttttttgtttgggtgggccaaacccgtgcctgttgatatgcgctacattgtctctcaaaaaggctctctagcatgcgtagtggtgagtttagccggggtggcttataatttcactctggccgttctgctcgctttcatcacgcattggagcttccaacaactagggatcaacgctttaagcattgatgaattgaatctttatcagctcgctttagtaacctttctcattcaaggcattctttataatcttgtcttaggcgttttcaatagcctccctatcccgcccttagacggctccaaagcgttaggctttttagcgttgcattttaaaagtgcgtttttattggaatggttttctaaaatggaacgctacggcttgttggtagtgtttatttttttgtttatcccccctttatcggagttttttatccatgcgcccacaagatttttattttctttactcctctcttaatcttttatcaaggagagtttatgaataagctcttaaagttttctcaa

SEQ ID NO: 10 - protein, 217 aa, Helicobacter pylori
MKILALLIAIIGHEIMHGLSAFLFGDRSTKDARRLSLNPIRHLDMMGSVLLPALLLIFQAPFLFGWAKPVPVDMRYIVSQKGSLACVVVSLAGVAYNFTLAVLLAFITHWSFQQLGINALSIDELNLYQLALVTFLIQGILYNLVLGVFNSLPIPPLDGSKALGFLALHFKSAFLLEWFSKMERYGLLVVFIFLFIPPLSEFFIHAPTRFLFSLLLS

SEQ ID NO: 11 - DNA, 373 bp, Helicobacter pylori
  CDS (70)...(336)
catcagatattatccaagcgccttttaaaatcttgcgccgtattttcacacctattgacatcatcgtggatgaagtcaaaaaaaacattgattcaaaaaggaagtaaaatgacgctcaatgaagccattaaagacaaagtttatgaaatcgtagaaatcgctaactgcgatgaagcccttaaaaaacgctttctctcttttggtatccatgaaggggttcaatgcattcttttgcattattccatgaaaaaagccacgctttcggttaaaatcaaccgcattcaagtggctttaagatcccatgaagcacaataccttgtcatcaaagaaagcgtgtgaaaatgggtttaaaacgcgctaaacgctataataa

SEQ ID NO: 12 - protein, 89 aa, Helicobacter pylori
MKSKKTLIQKGSKMTLNEAIKDKVYEIVEIANCDEALKKRFLSFGIHEGVQCILLHYSMKKATLSVKINRIQVALRSHEAQYLVIKESV

SEQ ID NO: 13 - DNA, 450 bp, Helicobacter pylori
  CDS (46)...(375)
gagccagttaattccatggtttcataagtgattttttggggctgtatgaggagctgtttgtttttgaaaactaattcggttttatccattttaatgggcgataagccatcattaaaaacgactgaaggcttcatcaaagtggctttaattacagaattttttaaaagcgatgggacaaactcgctaggagtgaaattggctttgattgaagcgttatcaatcttaaagctagcgaattggatcttatcaaaaatccatgtttttaaatttttttgcgattggcgttggaaaagaggctttaaaaacgccaggcttttcattacagaagtgttaatttttaattctatggtttttaaatcggttagcccttgcaaataaattgcagcgctgggttcgattaagggcttgacaatcaaattaaacgccattttcctagctttgggtgaatag

SEQ ID NO: 14 - protein, 110 aa, Helicobacter pylori
MRSCLFLKTNSVLSILMGDKPSLKTTEGFIKVALITEFFKSDGTNSLGVKLALIEALSILKLANWILSKIHVFKFFCDWRWKRGFKNARLFITEVLIFNSMVFKSVSPCK

SEQ ID NO: 15 - DNA, 450 bp, Helicobacter pylori
  CDS (56)...(394)
ggcaaattttgattgctagggctttaaatgcagcttttagcacaaaggagaatgaatggctaaaatgagcgctccagatggggttgccgtttgggtgaatgaagacaggtgtaagggttgtgatatttgcgtatcggtatgccctgctggggttcttggcatggggattgaaaaagaaagggtgcttggaaaagtggccaaagtagcctacccagagagctgtatcggttgcgtgcaatgcgagttgcactgcccggattttgcgatttatgtggctgacaggaaggatttcaaattcgctaaagtttctaaagaagcccaagaaagaagcgaaaaggttaaggccaataaatacatgctcttagaagagactattttagaagggagagacaaataatgcgtgagattatttctgatgggaatgaattagtcgctaaagcggcgattgaa

SEQ ID NO: 16 - protein, 113 aa, Helicobacter pylori
MAKMSAPDGVAVWVNEDRCKGCDICVSVCPAGVLGMGIEKERVLGKVAKVAYPESCIGCVQCELHCPDFAIYVADRKDFKFAKVSKEAQERSEKVKANKYMLLEETILEGRDK

SEQ ID NO: 17 - DNA, 1350 bp, Helicobacter pylori
  CDS (127)...(1251)
tgtggctgacaggaaggatttcaaattcgctaaagtttctaaagaagcccaagaaagaagcgaaaaggttaaggccaataaatacatgctcttagaagagactattttagaagggagagacaaataatgcgtgagattatttctgatgggaatgaattagtcgctaaagcggcgattgaagtggggtgtcggttttttgggggctatcctatcacgccaagttcggatattatgcatgcgatgagcgtggctttacccaaatgcggcggtcattttatccaaatggaagatgaaatcagcgggattagcgtgtctttaggagcgagcatgagcgggacgaagtctatgacagcaagctctgggcctggtatttcattgaaagtggagcaaatcggttattctttcatggcggaaatccctttagtgatcgctgatgtgatgcgttcaggcccatcaaccggaatgcccactcgtgtggctcaaggcgatgtgaatttcttaagacaccccatacatggggattttaaagccgtcgcgctcgctcctgcgaatttagaagaagcttacaccgaaaccgttcgcgcgttcaatttggctgaaatgctcatgactcctgtattcttgctcatggatgaaaccgtggggcatatgtatggcaaggtgcaaatcccagatttagaagaagtgcaaaagatgactattaatcgtaaggaatttctgggcgataaaaaagactacaagccttatggggtcgcacaagacgagccggctgttttgaaccctttctttaaaggttatcgctaccatgtttcaggcttgcaccatgggcctattggctttcctactgaagacgctaaaattggtggggatttgattgacagattatttaataagattgaatccaagcaagacattatcaacgaaaatgaggaaatggatttagagggtgctgaaatcgttgttatcgcttacggttcggtttctttggcggttaaagaggccttgaaagattaccataaagaaagcaagcaaaaagtcggctttttcaggcctaaaaccttatggccaagcccggctaaacgcttgaaagaaataggggataaatacgaaaaaatccttgtgattgaattgaataaagggcagtatttagaagaaattgaaagggctatgcaaagaaaggtgcatttcttggggcaagccaatgggcgcacgatttcgcctaaacaaatcatcgcaaaattgaaggagctttaaaatggcgtttaattatgatgaatatttgcgtgtggataaaatacccactttgtggtgttggggctgtggcgatggcgtgattttgaaatccattat

SEQ ID NO: 18 - protein, 375 aa, Helicobacter pylori
MREIISDGNELVAKAAIEVGCRFFGGYPITPSSDIMHAMSVALPKCGGHFIQMEDEISGISVSLGASMSGTKSMTASSGPGISLKVEQIGYSFMAEIPLVIADVMRSGPSTGMPTRVAQGDVNFLRHPIHGDFKAVALAPANLEEAYTETVRAFNLAEMLMTPVFLLMDETVGHMYGKVQIPDLEEVQKMTINRKEFLGDKKDYKPYGVAQDEPAVLNPFFKGYRYHVSGLHHGPIGFPTEDAKIGGDLIDRLFNKIESKQDIINENEEMDLEGAEIVVIAYGSVSLAVKEALKDYHKESKQKVGFFRPKTLWPSPAKRLKEIGDKYEKILVIELNKGQYLEEIERAMQRKVHFLGQANGRTISPKQIIAKLKEL

SEQ ID NO: 19 - DNA, 192 bp, Helicobacter pylori
  CDS (54)...(164)
tatgataaaagctctcatataacccgctactagccataagcaacagcaaggcaatgtatttaggcttaaacccaaaacgcaccaccaaaagcgccacagcccctattaaaatcatgttgatgcgttgcgcccagcaaaaaatacaaggcgaatctttcaaaacatagccaaaataaccttaaaaaacgcttt

SEQ ID NO: 20 - protein, 37 aa, Helicobacter pylori
MYLGLNPKRTTKSATAPIKIMLMRCAQQKIQGESFKT

SEQ ID NO: 21 - DNA, 1080 bp, Helicobacter pylori
  CDS (30)...(1049)
accataattagacaaacctttaaggatttatgatgattttcattgatgcatgttttagaaaggaaacgccttacacgcccatttggatgatgaggcaagcggggcgttaccttagcgaataccaagagagccgtaaaaaagcggggagtttcttggaattgtgtaaaaatagcgatctagccacagaagttaccttacagccggtagagattttaggcgtggatgcggctattttgtttagcgatattttagtagtgcctttggaaatgggcttgaatttggagtttatccccaaaaaggggccgcattttttagagacgattacggatttaaaaagcgtggaaagcctaaaagtaggggcttataaacaactaaactatgtctatgatacgatttctcaaacgcgccaaaagctttctagagagaaagcgttaatcggtttttgcggatcgccttggactttagcgacttacatgatagaaggcgaggggagcaaatcgtatgccaaaagcaagaaaatgctttatagcgagcctgaagttttaaaagcgcttttagaaaaattaagccttgaattgatagagtatttgagccttcaaatccaagcaggggtcaatgcagtgatgatctttgactcatgggctagcgctttagaaaaagaagcgtatttgaaattcagttgggattatttgaaaaaaatctctaaagagcttaaaaaacgctatgcgcatatcccagttatccttttccctaaagggattggcgcttatttggatagcatagatggggaatttgatgtgtttggcgtggattggggcacgcctttaactgcggcaaaaaagattttaggcggtaagtatgttttgcaagggaatttagaacccacccgcctttatgataaaaacgctttagaagaaggggttgaaacgattctaaaagtcatgggcaatcaagggcatatttttaatttagggcatgggatgttgccggatttacccagagaaaacgccaaatatttagtgcaattagtgcatgctaaaaccagacgatagggggattgatgaatactatcataagata

SEQ ID NO: 22 - protein, 340 aa, Helicobacter pylori
MMIFIDACFRKETPYTPIWMMRQAGRYLSEYQESRKKAGSFLELCKNSDLATEVTLQPVEILGVDAAILFSDILVVPLEMGLNLEFIPKKGPHFLETITDLKSVESLKVGAYKQLNYVYDTISQTRQKLSREKALIGFCGSPWTLATYMIEGEGSKSYAKSKKMLYSEPEVLKALLEKLSLELIEYLSLQIQAGVNAVMIFDSWASALEKEAYLKFSWDYLKKISKELKKRYAHIPVILFPKGIGAYLDSIDGEFDVFGVDWGTPLTAAKKILGGKYVLQGNLEPTRLYDKNALEEGVETILKVMGNQGHIFNLGHGMLPDLPRENAKYLVQLVHAKTRR

SEQ ID NO: 23 - DNA, 766 bp, Helicobacter pylori
  CDS (31)...(732)
tagacgactatgtgcattaagggaatgaaaatgatacgaaaaattttaataggactttttttgagttttttgagcatggaagctggcgaaaaagtgtatgcgattttcaatgtgaaagcgacacaagattccaaactcaccttagacagcacaggaattgtggatagcattaaggttactgaggggagcgtggtcaaaaagggcgatgttttgttgcttttatataatcaagacaaacaggctcaaagcgattccaccgaacaacaactcattttcgctaaaaagcaataccaacgatacagcaaaattgggggcgctgtggataaaaacactctagagggttatgagttcacttacaggcgcttggagtctgattacgcttattctattgcggtattgaataaaaccattttaagagccccttttgatggcgtgatagcgagtaaaaacattcaagtgggcgaaggggtgagcgcgaataacacggtgttattgagattagtcagccatgctaggaaattagttattgaatttgattctaaatatattaatgcggtcaaagtaggggacacttacacctattctatagacggggattctaatcagcatgaagctaaaatcactaagatttaccccacggttgatgaaaacaccaggaaagtgagcgctgaagcccttttatctaagcctatggcagtggggctttttggcgatgggtttatccaaacgaaataataggatattttgatgtataaaacagcgatta

SEQ ID NO: 24 - protein, 234 aa, Helicobacter pylori
MIRKILIGLFLSFLSMEAGEKVYAIFNVKATQDSKLTLDSTGIVDSIKVTEGSVVKKGDVLLLLYNQDKQAQSDSTEQQLIFAKKQYQRYSKIGGAVDKNTLEGYEFTYRRLESDYAYSIAVLNKTILRAPFDGVIASKNIQVGEGVSANNTVLLRLVSHARKLVIEFDSKYINAVKVGDTYTYSIDGDSNQHEAKITKIYPTVDENTRKVSAEALLSKPMAVGLFGDGFIQTK

SEQ ID NO: 25 - DNA, 630 bp, Helicobacter pylori
  CDS (62)...(544)
  misc_feature 42, 47: n = A,T,C or G
acgccaaagagagcaacggggagtttttagtcgctttagcgnagcgnttgtgctgatttatatgattttagcggcgttgtatgagtccattttagagccttttatcatcatggttaccatgcctttaagtttttcaggggcgttttttgctctaggtttagtccatcagcctttgagcatgttctctatgataggcttgattttgctcattggtatggtgggtaaaaacgccacgcttttaattgatgtggcgaatgaagagcgtaaaaaaggtttgaatatccaagaggccattttatttgccggcaaaacccgtctaagaccgattttaatgacgaccattgcgatggtttgcgggatgctgcctttagcgttggcgagtggggatggagcggcgatgaaatcccctatagggattgcgatgagtgggggcttgatgatttctatggtgttaagcttactcattgtgccggtgttttatcgtttgctcgctcccatagacgacaaaatcaagcggttttatcaaaaccaaaaaactttagaatgaaaaaaattgctttcattttggctttatgggtgggcttgttaggggcgtttgagcctaaaaaaagtcatatttattttggggct

SEQ ID NO: 26 - protein, 161 aa, Helicobacter pylori
MILAALYESILEPFIIMVTMPLSFSGAFFALGLVHQPLSMFSMIGLILLIGMVGKNATLLIDVANEERKKGLNIQEAILFAGKTRLRPILMTTIAMVCGMLPLALASGDGAAMKSPIGIAMSGGLMISMVLSLLIVPVFYRLLAPIDDKIKRFYQNQKTLE

SEQ ID NO: 27 - DNA, 1007 bp, Helicobacter pylori
  CDS (19)...(945)
  misc_feature 920: n = A,T,C or G
taaaaggtttttacaaacatgataaaaagccaaaaagaatatttagaaagaattgcatatttaaacaccctatcgcaccattattacaaccttgatgaacccatcgtaagcgatgcgatctatgatgaactttaccaagaattgaaagcttatgaagaaaaaaaccctaatggcattcaagctaattcccctacccaaaaagtgggggctactaccaccaattcgttcaataaaaacccccatttaatgcggatgtggagcttagatgatgtgttcaatcaaagcgaattgcaagcgtggttgcaacgcattttaaaagcctatcctagtgcttcgttcgtgtgttcgcccaaacttgatggggtttcgctcaatcttttgtatcaacatggcaagctagtgaaggcgaccactaggggcaacggcttagaaggagaattagttagcgcaaacgctaaacacatcgctaatatcccccacgctatcgcttataatggagaaatagaaatcaggggcgaagtgatcatttctaaaaaggattttgacgctttgaatcaagagcgcttaaacgctaatgaacccctattcgctaaccccagaaacgccgcatcagggagtttgaggcaacttgatagcgaaatcactaaaaagcgtaaattgcaattcattccttggggcgtgggcaagcattctttaaattttttaagctttaaggagtgtttggattttatcgtctcgttaggttttagcgccattcaatacttaagcctaaacaaaaaccaccaagaaatagaagacaattaccacaccctaattagagaaagggagggcttttttgcccttttagacggcatggtgatcgttgtgaatgaattaaatattcaaaaggagctaggctacacgcaaaaatcccctaaatngcttgcgcttataaattcccggctttagaaaaacacaccaaaattgtaggagtcattaaccaagtggggcgcassgggcgatcacac

SEQ ID NO: 28 - protein, 309 aa, Helicobacter pylori
  VARIANT 301: Xaa = Any Amino Acid
MIKSQKEYLERIAYLNTLSHHYYNLDEPIVSDAIYDELYQELKAYEEKNPNGIQANSPTQKVGATTTNSFNKNPHLMRMWSLDDVFNQSELQAWLQRILKAYPSASFVCSPKLDGVSLNLLYQHGKLVKATTRGNGLEGELVSANAKHIANIPHAIAYNGEIEIRGEVIISKKDFDALNQERLNANEPLFANPRNAASGSLRQLDSEITKKRKLQFIPWGVGKHSLNFLSFKECLDFIVSLGFSAIQYLSLNKNHQEIEDNYHTLIREREGFFALLDGMVIVVNELNIQKELGYTQKSPKXLALINSRL

SEQ ID NO: 29 - DNA, 937 bp, Helicobacter pylori
  CDS (44)...(880)
gtgctttagattagatgcagaaaaagacgcccaactttatggcatgaatatttttaagatccgagaaattatccattatgacggggaggttacagagattcttggggggagcgatggcgtgatgctcgggtttcttagcgttaggggcgagtctatccctttagtggatgtgaaaaggtggttgcattataacgctaatgatccgagccgtgatctaaaagaatgcagcgttaaagatgaccataatttggtgattgtgtgccatttttctaaccattccatcgctctaaaggttttaaaaattgaaaggatcatccataaaaattggactgagattagcgctggggacaaacaaggcattaatgaagagggtaagcttagcgctatcactcgttttgatgaagaacgagtggtgcagatcttagatgtggaaaaaatgattagcgatgttttccctagcttgaaagatttagacgatttgactttgcgttgcatagaagccattcaaagccaaaaactcattttaatcgctgaagactccctaagcgctcttaaaaccttagaaaagatcgttcaaactttagaattgcgttatttagcttttccaaacgggagggaattgttggattatttgtatgaaaaagaacattaccaacaagttggcgtggtcattacggatttagaaatgcctaacatttcagggtttgaagtgttaaaaaccattaaagctgatcatagaactgagcatcttcctgtgattatcaattcgtccatgagcagcgattctaaccgccagttagcccaatctttagaagcggatggttttgtggtaaaatctaacattcttgaaatccatgaaatgcttaaaaaaacgctttcataaatttaatttttgttttaatttaaagggataaaacatgcgaagtcatttttgcac

SEQ ID NO: 30 - protein, 279 aa, Helicobacter pylori
MNIFKIREIIHYDGEVTEILGGSDGVMLGFLSVRGESIPLVDVKRWLHYNANDPSRDLKECSVKDDHNLVIVCHFSNHSIALKVLKIERIIHKNWTEISAGDKQGINEEGKLSAITRFDEERVVQILDVEKMISDVFPSLKDLDDLTLRCIEAIQSQKLILIAEDSLSALKTLEKIVQTLELRYLAFPNGRELLDYLYEKEHYQQVGVVITDLEMPNISGFEVLKTIKADHRTEHLPVIINSSMSSDSNRQLAQSLEADGFVVKSNILEIHEMLKKTLS

SEQ ID NO: 31 - DNA, 630 bp, Helicobacter pylori
  CDS (21)...(593)
ataatttaaaaggatacgatatgaaacaactatttttgatcattggagccccagggagtggtaaaaccactgatgcagagcttatcgctaaaaataacagcgaaacaatcgctcatttttctaccggggatttactcagggctgagagcgctaaaaagaccgagcgaggcttattgattgaaaaattcacttctcaaggcgaattagtgcctttagaaattgtggtagaaacgatcctttcagcgattaaaagctctggtaaagggatcattttaattgatggttatcctaggagcgtggaacaaatgcaggctttggataaggaattgaacgctcaaaacgaagtgatcttaaaaagcgtgattgaagtagaagtgagtgaaaacactgctaaagaaagggttttagggcgctctaggggggctgatgataatgaaaaggtgtttcataaccgcatgcgggtgtttttggatccgttgggcgagatccaaaatttttacaagaataagaaggtgtataaagcgatcgatggggagaggagcattgaagagattgtgggcgaaatgcaagagtatatcttgtctttcggtaattaaaatgcactctcaaggagaatagctgtgatttctg

SEQ ID NO: 32 - protein, 191 aa, Helicobacter pylori
MKQLFLIIGAPGSGKTTDAELIAKNNSETIAHFSTGDLLRAESAKKTERGLLIEKFTSQGELVPLEIVVETILSAIKSSGKGIILIDGYPRSVEQMQALDKELNAQNEVILKSVIEVEVSENTAKERVLGRSRGADDNEKVFHNRMRVFLDPLGEIQNFYKNKKVYKAIDGERSIEEIVGEMQEYILSFGN

SEQ ID NO: 33 - DNA, 777 bp, Helicobacter pylori
  CDS (1)...(717)
agttacccccccccccccaatcccacacaagaaacgcaacaagattttattattgaagcacaacaagatttgattattgaaacgcaacaagaccccaaagaactacctgagtcttgcaaaataacgccccaaaaaatctcttttaaccaagtggtttttaaaaaaattaaaagaaaactcaaccgcttcattggaagcattttagctcggacagaagtgtataagaatctcgtggcaaaatacgatgaactcacaggaaaatacgaatcattattggcaaaagaggcaaacatcaaagagaccttttgggaaaggcgtgctgatagcgaaaaagaagccttttttttagagcatttttacctcactagcgtgtatgtggcttctacagcaggatactatatcacgcctaagggcgctaaaacctttatagaagccacggagcgttttaaaatcatagagccggtggatatgttcataaacaaccccacttaccatgatgtggctaattttacctatttgccttgccctgtttctttaaacaagcatgctttcaatagcaccattcaaaatgcaaaaaagcctgacatttcattaaaaccccctagaaaatcctattttgataatcttttttatgatcaattaaacactagaaagtgcttaaaagcctttcacaaatacagcagacgatacgctcctttaaaaacccctaaagaggtttaaaaagagcgggctttatgttagaataagtctttttattcaaaggagattgcaatgaat

SEQ ID NO: 34 - protein, 239 aa, Helicobacter pylori
SYPPPPNPTQETQQDFIIEAQQDLIIETQQDPKELPESCKITPQKISFNQVVFKKIKRKLNRFIGSILARTEVYKNLVAKYDELTGKYESLLAKEANIKETFWERRADSEKEAFFLEHFYLTSVYVASTAGYYITPKGAKTFIEATERFKIIEPVDMFINNPTYHDVANFTYLPCPVSLNKHAFNSTIQNAKKPDISLKPPRKSYFDNLFYDQLNTRKCLKAFHKYSRRYAPLKTPKEV

SEQ ID NO: 35 - DNA, 1350 bp, Helicobacter pylori
  CDS (50)...(1252)
aagtggaaaatttagctaaagaaagagaaaaaagtttaaaggattaggcatgatcaataagtttaaaaattttgtgagcaactaccagcaatctaaccactataaagagcctttaggttttggcattgccagagtggatattgcccctatttccaaaaagattttatgcgccacttaccctgttttgaattggaaagatgaaaatttaggctcttatgcggtgttttgcaactcgctttcaaaagaaaaaatcctaaaagagagcgcgagcgagcgcgttattgagattgatgaaagttttgtgttaaaagcgttggatttttatacgccctttttgaatgaagcctattctaataaaatggctcataaaaacatccaagtggttttagagcttttaaaggctttagaagaaaatcgtttgaaaaatagcgatggggagtctctttatcgcttggtgatcttgtatgaagataagccttgcgagagcgtggagagcgcgtatatgaaacttttagcgctctctttaggtaaagcccctttgaggagtttgaatttagagggtatttttaaccagctttctaatgcggcctggagcggtaacaagccctatgaattagaatggcttagaatgaacgaagtggctttaaaaatgcgagaccatttccctagcattgatttcatagataaattcccacgctatttgatgcaattaatccctgagtttgataatatccgcttattggatagctcaaaaacgcgctttggggcgtatttagggactggaggttatacccaaatgcctggggctagttatgtgaattttaacgcaggggctatgggagtgtgcatgaatgaggggcgtatttcttcatcggtggtggttggagcaggcactgatattggtgggggagcgagcgtgttaggcgttttaagtggagggaataacaaccccattagcatcgggaaaaattgtttgctaggggctaatagcgttactggaattagtctaggcgatggctgtatcgtggatgcaggcgttgcgatactagccgggagcgtgatagaaattgaagaaaatgagtttaaaaagcttttagaagtgaatagcgctttagaaaaacatgccaacaacctttacaaaggcaaagaactttccggaaaaaatggcgtgcattttcgttccaatagtcagaatggcaagctgattgcttttaggagcgtgaaaaaaattgagttgaatcaaaacctgcattaaggattaaaagaatgctcaaaaaaagtttgttattgcttgtttttttagtcttacagcttagcggcgctgaagaaaacaatcaagccccaaaaaac

SEQ ID NO: 36 - protein, 401 aa, Helicobacter pylori
MINKFKNFVSNYQQSNHYKEPLGFGIARVDIAPISKKILCATYPVLNWKDENLGSYAVFCNSLSKEKILKESASERVIEIDESFVLKALDFYTPFLNEAYSNKMAHKNIQVVLELLKALEENRLKNSDGESLYRLVILYEDKPCESVESAYMKLLALSLGKAPLRSLNLEGIFNQLSNAAWSGNKPYELEWLRMNEVALKMRDHFPSIDFIDKFPRYLMQLIPEFDNIRLLDSSKTRFGAYLGTGGYTQMPGASYVNFNAGAMGVCMNEGRISSSVVVGAGTDIGGGASVLGVLSGGNNNPISIGKNCLLGANSVTGISLGDGCIVDAGVAILAGSVIEIEENEFKKLLEVNSALEKHANNLYKGKELSGKNGVHFRSNSQNGKLIAFRSVKKIELNQNLH

SEQ ID NO: 37 - DNA, 1304 bp, Helicobacter pylori
  CDS (50)...(1201)
ttatttttattatgttaagataatgaaaatttctaattaaggagtggtcatgttctacgatgaaaaaaagacctatcaaaagattgaagaacgccttgatatagtccgttcgtttaacgctcacaacgagcataaaaacttgcaagacgagtttaaaggggcgggcatttctaggcgcgatttattgaagtgggcgggcatgatgagcacagcgttagccttgccggctagttttgctcccttgactttgaaggcggtggaagtggctaacagattgcccgtgatttggttgcacatggcagaatgcaccggttgtagcgaaagtttgttaaggagcgcagaccccaccattgatagcattatctttgattacatcaacctagaataccatgagaccatcatggtagcgagcggttttcaagctgaaaaaagcttgcatgacgccatagaaaagcataaaaacaattacattttaatggtagaagggggtatcccccaaggcacggaatacttcctcactcaaggcccaaacgctgaaacgggagctgaagagtgtaggaaagccgctcaatacgcagccgctatttttgccataggcacatgctcaagttttgggggcgttcaagcggcttaccctaacccctctaacgcgcaacccttgcataaaatcattgataaacccgtgatcaatgttcctggttgcccgcctagtgaaaaaaatatcgtgggtaatgtgctttattacttgatgtttggggctctccctaaattggatgcgtataaccgcccctcttgggcttatgggaacaggatccatgatttgtgcgaaaggagagggcattttgatgcgggcgaatttgtggagcattttggcgatgaaaacgctaaaaggggcttttgtttgtataaaatgggctgtaaagggccttacactttcaacaattgctccaaactccgcttcaattcacacacctcttggcccataggtgcagggcatgggtgtatagggtgttctgagcctaatttttgggatacgatgagtccttttgaagagcctttagcgaatcgttccattaaaaccgcttttgacggattaggggctgataaagtagcggataaagtaggcacgactttgctgagcgcaaccgctattggcattgttgcgcatgcgctcctttctaaagcgatcaaaaacaaagagtaagggattaacatgtcaaaaaaaatcgtagtcgatcctatcactaggattgaggggcatttaaggattgaagtgatcgtagatgatgataacgtgatcactg

SEQ ID NO: 38 - protein, 384 aa, Helicobacter pylori
MFYDEKKTYQKIEERLDIVRSFNAHNEHKNLQDEFKGAGISRRDLLKWAGMMSTALALPASFAPLTLKAVEVANRLPVIWLHMAECTGCSESLLRSADPTIDSIIFDYINLEYHETIMVASGFQAEKSLHDAIEKHKNNYILMVEGGIPQGTEYFLTQGPNAETGAEECRKAAQYAAAIFAIGTCSSFGGVQAAYPNPSNAQPLHKIIDKPVINVPGCPPSEKNIVGNVLYYLMFGALPKLDAYNRPSWAYGNRIHDLCERRGHFDAGEFVEHFGDENAKRGFCLYKMGCKGPYTFNNCSKLRFNSHTSWPIGAGHGCIGCSEPNFWDTMSPFEEPLANRSIKTAFDGLGADKVADKVGTTLLSATAIGIVAHALLSKAIKNKE

SEQ ID NO: 39 - DNA, 810 bp, Helicobacter pylori
  CDS (39)...(710)
tagagcctaatttcgctaaattctaaaaagggttacgcatggataaaatgaataaggtcgttttacacaaagaatattccggttttgtgcgctttttccattgggttagggctttgagtattttcgctttaatcgctacagggttttacatcgcttacccttttttgcagcctaattccagcttttataaaggggtgtatcttttacaagcttatgtgcgttcttttcatgtcatgtttgggtttttgctcattagcgcattaatctttagaacctatctttttttcactaaagaaagcttgatggaacgcaagagttttagccaacttttaagcccaaaagcctggattgatcagatgaaagcgtattttcttatcagcggcaaaccccacactaaaggagcgtataaccctatccaactcgtggcttattccactttgattgttttgatcgtgttgatgagtttgagcgggatggtgctgtattataatgtctatcatgcggggcttggagcgtttttaggaagcgcttttaagtggtttgaaacgctttgtggagggttagcgaatgttcgtttcatccaccacttagcgacttgggggtttattttgtttgtccctgtgcatgtttatatggtgtttttccattctatcaggtatgaaagttcgggggcggattctatgattaatggctatggttataccaaagaatgagtcaaaaaatcctaattctaggtattggcaatatcctttttggcgatgaagggattggggtgcatttagcccactacctcaaaaaaaatttttcttt

SEQ ID NO: 40 - protein, 224 aa, Helicobacter pylori
MDKMNKVVLHKEYSGFVRFFHWVRALSIFALIATGFYIAYPFLQPNSSFYKGVYLLQAYVRSFHVMFGFLLISALIFRTYLFFTKESLMERKSFSQLLSPKAWIDQMKAYFLISGKPHTKGAYNPIQLVAYSTLIVLIVLMSLSGMVLYYNVYHAGLGAFLGSAFKWFETLCGGLANVRFIHHLATWGFILFVPVHVYMVFFHSIRYESSGADSMINGYGYTKE

SEQ ID NO: 41 - DNA, 1543 bp, Helicobacter pylori
  CDS (32)...(1495)
aagcctgaattttacgccccttttagagcgaatggcatgcaatttgcaagcgcgtttttatagcgtttataaggataataccacttctttctacctccaagcgagcgctgaaaccactttagagttcgcgcaaaaactcagcgaaattctgcccttttctttagattttagctttttgtctttaaaggaaatcacagagcctttagatgaaaatcttttccaaacagcaagcctttcaaagcccctttttatgaacgctaaagagcatcaagattttttagacaaaaattcatctttgtatgccgatactctgggcttgattaaaaacaccgcttttaagggggatataatccatagccctaaagagcttatagattgcttaacccaattaaaaggcatgctcaaaacgcaagattttatccctattttcacttctagagaggcgttatccctttctttaaaaaatccctctccaagcgttatttttagcgatctttctagcgttttgagctgcactaaattgcctttagaggacgctaaatatttggccagtttggaaaaaccctccatcaaagccccattaaaaagcgtgtttaaagacactttcaaaaacgatgaaatcatcgcccagctaccctatgaccccatattgaatttattgtgccatattttacaagatgaggggatagaatttgtttttatgcatgaaagccgttcttgtgaagcgcttttgtattatgaagcgctttttaaaacccctaaacgcttgatcacacccactaaaaaattcgtgctagaaaataatttttctacctttccctttaaagatgaattagagtttttaagcgcaacccccaattctatcgttttgtatctcagtttcaagcgccctacaaggttgttattgcatgctaatggttctttaaaaacgcttttaagcgtcagttttgattttaacaaaatgtttaacgcgctcaaacaagatgaaaaagcctccagaatgctacaaaactacgccactaaattccctgatttttacgcgcgcattgtagagctttctaaatacgatctagggggcgcgaatttattggattttttttgcattttagggtttgttttgggctatagcgaggatttttgcacacagagcgttattcctttggctaaagaatgcttacgccctaaaggccctaggattgattataaaatccttaaagacaattctttgaaaatggctttaaacttttcaaagatcatgcacagtgcgatgagtttcaggctcgcaggcgtggaaaatgaaattttgagtttggggattttggattctttagcggagtttttagggaatttcatttgggataacgcgcaaaattttagcgttcaagaagtaacgatcgctggggatttctttggcgaaaaagtgtttttggatttgtttgtgcggtatttccctaaaaccctagcccttaaaacgcatgcatttttggattatgaataagggcttaaaagcggatgtgcatcatcagcccgccgtccatgtatt

SEQ ID NO: 42 - protein, 488 aa, Helicobacter pylori
MACNLQARFYSVYKDNTTSFYLQASAETTLEFAQKLSEILPFSLDFSFLSLKEITEPLDENLFQTASLSKPLFMNAKEHQDFLDKNSSLYADTLGLIKNTAFKGDIIHSPKELIDCLTQLKGMLKTQDFIPIFTSREALSLSLKNPSPSVIFSDLSSVLSCTKLPLEDAKYLASLEKPSIKAPLKSVFKDTFKNDEIIAQLPYDPILNLLCHILQDEGIEFVFMHESRSCEALLYYEALFKTPKRLITPTKKFVLENNFSTFPFKDELEFLSATPNSIVLYLSFKRPTRLLLHANGSLKTLLSVSFDFNKMFNALKQDEKASRMLQNYATKFPDFYARIVELSKYDLGGANLLDFFCILGFVLGYSEDFCTQSVIPLAKECLRPKGPRIDYKILKDNSLKMALNFSKIMHSAMSFRLAGVENEILSLGILDSLAEFLGNFIWDNAQNFSVQEVTIAGDFFGEKVFLDLFVRYFPKTLALKTHAFLDYE

SEQ ID NO: 43 - DNA, 715 bp, Helicobacter pylori
  CDS (17)...(694)
tttttaaggaattttgatggaacaaaaaatttgcgtgatcggttttagcggcgggcaagacagcaccactttagccgtgtgggcgaaaaagcgttttaaaaaagtctgtttagtggggtttgattatgcgcaaaaacactctgtggaattagaatgcgctcaaaaaatcgcttctcttttacaactcccttatgaaatcatcccattagattttttagaaaatatcacccgctctgcgctttttaaaaactctaacgatttaatagggcattcgcatgcgcaaaataaagatttacccaattcttttgtgcctaatcgtaacgctatttttatcacccttttgcattcttacgcgcaaaaactaggggctagcaatatcgctttaggagtttcgcaagcggattttagcggctatccggattgtaaagaagattttattaaaagcatcgagcatgccttaaatttaggatcaaacacggcgattaaaatcctaacgcctttaatgtttttgaataaagcgcaagaatttcaaatggctaaagatttgggcgtcttggatttagtcatcaaagaaacgcacacctgctatcaaggagagcgaaagattttgcatgcttatggttatggttgcgataaatgcccggcatgccaattgagaaaaaaaggctttgaagagtttcaagctaataaaaaataaggttttttaaaaaaccaa

SEQ ID NO: 44 - protein, 226 aa, Helicobacter pylori
MEQKICVIGFSGGQDSTTLAVWAKKRFKKVCLVGFDYAQKHSVELECAQKIASLLQLPYEIIPLDFLENITRSALFKNSNDLIGHSHAQNKDLPNSFVPNRNAIFITLLHSYAQKLGASNIALGVSQADFSGYPDCKEDFIKSIEHALNLGSNTAIKILTPLMFLNKAQEFQMAKDLGVLDLVIKETHTCYQGERKILHAYGYGCDKCPACQLRKKGFEEFQANKK

SEQ ID NO: 45 - DNA, 1201 bp, Helicobacter pylori
  CDS (49)...(1155)
tcctctcatgagctttacttggtaggggggtgcgtgcgcgattatttaatgggcattaccccaaaagattacgatttaacctcaaacgctttagtcaatgaaagcaaagagcttcttttaaagcgccattttagggtgctagaaaccggtatcaaacatggtacgatcacggctcttaaaaaccatcaaagctatgaaatcacaacttttagaattgaaaaggggcatatcaaacaccgaaagcctaaagaattggtttttagcgttcatttaacagacgatttaaagcggcgcgattttagcatgaatgcgatcgcttatagccctacaaaagggctgattgatccttttaaagggcagaatgcgattgaaaatcaaatgattgaatgcgtgggggaagcgcgattaaggttttttgaagacgctttaaggattttaagatcgctgcgattcagtgcaactttaggctttaagatagcgccaaacaccaaagaagcggtttttgcgtgtaaggatttgttaaaacacctttctaaagaacgcttacaaagtgaattgaataagcttcttatggggaaaaacgcctatgaagtggctaaagaatatcaagaaattttagagttggttattcaagaaaaaatagaaaatttagggtttttaaaaaacgcgcctttcaatctggaattaagattgttagggttttttaagcatcaaaaaagtttagaaagtttacgctaccctaaaaaaacgatcgttttattttccaaagctaaagaatgccataaatcttttttaaatattcataacaaaacagagttaaaatttttattgaaaaactacgatttagagccttttaatttggctttagatttttatgcgctcaaaaaccccaaacatgctttaaaaattaaaggcttgttaaaagaaatctttgattctaacgagccttttaaaaaagaacacttggcccttaagggcggtgcgcttcaaagcttgggttaccagcaccaaaaaatcggcgaaattttaaacgcatgcttagatttagtcatcgctaaccctaaaaataacgctttagaatggctgattgaatgggttaagggtcattatttacctaatgatactataaatctttcgccaataggcagaagaaattaaaaacagagaaaacatgataacgatgaatgcgattcaatggcct

SEQ ID NO: 46 - protein, 369 aa, Helicobacter pylori
MGITPKDYDLTSNALVNESKELLLKRHFRVLETGIKHGTITALKNHQSYEITTFRIEKGHIKHRKPKELVFSVHLTDDLKRRDFSMNAIAYSPTKGLIDPFKGQNAIENQMIECVGEARLRFFEDALRILRSLRFSATLGFKIAPNTKEAVFACKDLLKHLSKERLQSELNKLLMGKNAYEVAKEYQEILELVIQEKIENLGFLKNAPFNLELRLLGFFKHQKSLESLRYPKKTIVLFSKAKECHKSFLNIHNKTELKFLLKNYDLEPFNLALDFYALKNPKHALKIKGLLKEIFDSNEPFKKEHLALKGGALQSLGYQHQKIGEILNACLDLVIANPKNNALEWLIEWVKGHYLPNDTINLSPIGRRN

SEQ ID NO: 47 - DNA, 360 bp, Helicobacter pylori
  CDS (50)...(340)
ttttcccctatatccaaagccatcatcaagaagttttaaggctcaaagcatgattttttccactcttattaatgcgatagcggtgattttaagctcgctcattacgatttatatgtggatagtaatcatttattcgcttatcagtttcgtgcagcctaaccccaataaccccatcatgcaaattctcgctcgcttgtgtgagccggtgttttattttttacgctctagattcaagctggtgtttaacgggttggatttctctcctttagtggtggtcattgttttgaaattcttggatctcacgctcattcagtggcttttcatgctcgctaaaaacctttaaagaaaatcatgcgtttt

SEQ ID NO: 48 - protein, 97 aa, Helicobacter pylori
MIFSTLINAIAVILSSLITIYMWIVIIYSLISFVQPNPNNPIMQILARLCEPVFYFLRSRFKLVFNGLDFSPLVVVIVLKFLDLTLIQWLFMLAKNL

SEQ ID NO: 49 - DNA, 1740 bp, Helicobacter pylori
  CDS (22)...(1701)
taaaaacctttaaagaaaatcatgcgtttttttaccttgttttttatcggtatgcttggcgttggtttttctcaaaccgagttaaatttaaaagatttagaaaaaaagcccgccgggatcgttagggattattatttgtggcgttatattagcgataaaaaaaccagtttagaaaacgctaaaaaagcctatgaattgactcaaaataaaaacaacgccctacaaaaggccatgcaagaaaaaggctcagacaatgcagaaaaaaaccctgatgttaaattgcctgaagatatttattgcaagcaaacggctttagaaagcatgctagaaacaacagacactttccaagcaagctgcatcgctatcgctttaaaatcaaagatcagagattttgataaaatccctattgaaacccttaagcccttacaaattaaaatcaaagaggcttaccccgttctttatgaagaattagaaattttgcaaagtaagcatgtgagcgcttctttgtttaaggctaacgcgcaagtgtttagcgcgcttttcaatcatttgagttatgaaaaaaagctccaaatttttgaaaagcatatccccattaaagagttaaaccgtcttttagacgaaaattatccggcgtttaaccgcttgatctatcaggttattttagatcctaaattggatcattttaaagacgctctcactaaaagtaacgctacccacagcaacgcgcaaaccttttttattctagggattaatgaaatcttgcgcaaaaaaccctctaaagcgctcaagtattttgaacgatcagaagcggttgtcaaagacgatgatttttcaaaagacagagcgattttttggcagtatttagtttctaaaaagaaaaaaactttagaacgcctttcacaaagcccagctttaaatctctatagtctttatgcgagccgcaaactcaaaaccacgcccagttaccgcatcatttcacgcatccagaatttaagccaagaagatcctccttttaacacttatgaccctttttcgtggcaaatttttaaggaaaaaaccttgagtttgaaagatgagggcgcgtttaatgcgatgctaaaaagcctgtattatgaaaaaagcgctcctgaattgacctatcttttaagccaacgcaataaagacaagatttattattatttatccccttatgagggcattattgaatggcaaaatactgatgaaaaggctatggcgtatgcgatcgctaggcaagaaagctttttgctcccggcagtcatttcgcgctcgttcgctctggggcttatgcaaatcatgccctttaatgtagggcctttcgctaaaagccttggcatggataacattgatctaaacgacatgtttaaccccaacatcgctctcaaatttggcaattattacttgaaccatttgaaaaaagaattcaaccaccccctttttgtcgcctacgcttataacgctgggcctgggtttttaaggaggtggttagaaagttccaaacgatttaaagaaaaaaatcattttgagccatggcttagcatggagcttatgccttatagcgagactcgcatgtatggctttagggtcatgctcaattacttgatttatcaagaaatttttgggaatttcatccctattgatggatttttagaacaaactcttaactcaaaggacaaaccatgattaaaaaatgcctttttcctgctgcgggctatggca

SEQ ID NO: 50 - protein, 560 aa, Helicobacter pylori
MRFFTLFFIGMLGVGFSQTELNLKDLEKKPAGIVRDYYLWRYISDKKTSLENAKKAYELTQNKNNALQKAMQEKGSDNAEKNPDVKLPEDIYCKQTALESMLETTDTFQASCIAIALKSKIRDFDKIPIETLKPLQIKIKEAYPVLYEELEILQSKHVSASLFKANAQVFSALFNHLSYEKKLQIFEKHIPIKELNRLLDENYPAFNRLIYQVILDPKLDHFKDALTKSNATHSNAQTFFILGINEILRKKPSKALKYFERSEAVVKDDDFSKDRAIFWQYLVSKKKKTLERLSQSPALNLYSLYASRKLKTTPSYRIISRIQNLSQEDPPFNTYDPFSWQIFKEKTLSLKDEGAFNAMLKSLYYEKSAPELTYLLSQRNKDKIYYYLSPYEGIIEWQNTDEKAMAYAIARQESFLLPAVISRSFALGLMQIMPFNVGPFAKSLGMDNIDLNDMFNPNIALKFGNYYLNHLKKEFNHPLFVAYAYNAGPGFLRRWLESSKRFKEKNHFEPWLSMELMPYSETRMYGFRVMLNYLIYQEIFGNFIPIDGFLEQTLNSKDKP

SEQ ID NO: 51 - DNA, 770 bp, Helicobacter pylori
  CDS (16)...(738)
taaaaagaaggacaaatgatgccatttgaagctgtaatcgggctagaagtccatgtccaactcaacaccaaaaccaaaatcttttgctcttgctctacaagctttggagaatcccctaattctaacacctgccctgtgtgtttgggtttaccgggagctttgccggtattgaataaagaagtggttaaaaaagccatccaattaggcacagccattgaagccaatatcaaccaatattctatttttgcgaggaaaaattatttttaccctgatttgcctaaggcttatcaaatttcgcagtttgaagtccctattgtgagcgatgggaaattagagattgacactaaagagggtgcaaaaatcgtgcgtattgaaagggcccacatggaagaagacgccggtaaaaatatccatgagggcagttattctttagtggatttgaaccgcgcttgcacccctttattagaaattgtcagtaagccggacatgcgaaatagtgaagaagctatagcgtatttgaaaaagctccatgctatcgtgcgttttatagggatttctgatgcgaacatgcaagaggggaatttcaggtgcgatgcgaacgtgtccattagacccaaaggcgatgaaaagctttatacgagagtagagattaaaaatctaaatagctttagattcattgctaaagcgattgaatacgagatagagcgccaaagcgcggacgtgggagaacgggcgctataatgaagaggtggttcaagaaacgcgccttt

SEQ ID NO: 52 - protein, 241 aa, Helicobacter pylori
MMPFEAVIGLEVHVQLNTKTKIFCSCSTSFGESPNSNTCPVCLGLPGALPVLNKEVVKKAIQLGTAIEANINQYSIFARKNYFYPDLPKAYQISQFEVPIVSDGKLEIDTKEGAKIVRIERAHMEEDAGKNIHEGSYSLVDLNRACTPLLEIVSKPDMRNSEEAIAYLKKLHAIVRFIGISDANMQEGNFRCDANVSIRPKGDEKLYTRVEIKNLNSFRFIAKAIEYEIERQSADVGERAL

SEQ ID NO: 53 - DNA, 487 bp, Helicobacter pylori
  CDS (16)...(444)
atgggagtggattgaatgcaagaaattgaaattttttgcgatggctcttctttaggcaatcccgggccaggcggttatgcggcgattttacgctataaagataaagaaaaaaccatcagtgggggcgaagaattcaccacgaataaccgcatggaattaagagcgctcaatgaagcgttaaaaattttgaaacgcccatgccgtatcacgctttatagcgattcgcaatacgtgtgccaagcgatcaatgtgtggctagctaactggcaaaaaaagaatttttctaaagttaaaaatgtggatttatggaaagaatttttagaagtctctaaagggcattctattgtggctgtttggatcaaggggcataacgggcatgccgagaatgaacgatgcgatagcctcgctaaattagaggcgcaaaaacgggtcaaaacgaccacttaaagggaaaaatgatgaaaaacaaacgctctcaaaacagccc

SEQ ID NO: 54 - protein, 143 aa, Helicobacter pylori
MQEIEIFCDGSSLGNPGPGGYAAILRYKDKEKTISGGEEFTTNNRMELRALNEALKILKRPCRITLYSDSQYVCQAINVWLANWQKKNFSKVKNVDLWKEFLEVSKGHSIVAVWIKGHNGHAENERCDSLAKLEAQKRVKTTT

SEQ ID NO: 55 - DNA, 1217 bp, Helicobacter pylori
  CDS (48)...(1181)
atgtatgcgaccgctaaaggcaaaagcaaaaaagaagccgaacagcaatgcgcttatcaagcgcttcaaaaactgaaggaagccaaatgaacactttggggcgttttttaaggctcacgacttttggggaatcgcatggggatgtgatagggggggtattagacggcatgcctagcgggattaaaatagactatgcgctattagaaaatgaaatgaagcgccgccaaggggggaggaacgttttcattacgccacgaaaagaagacgataaagtggaaataacaagcggggtttttgaagattttagcacagggactcctatagggtttttaatccacaaccaaagggctaggagcaaggattacgataacattaaaaacctttttaggcctagccatgcggatttcacttattttcataaatacggcattagggattttaggggtggggggaggagttcggccagagagagtgctataagagtggctgctggggcgtttgctaaaatgcttttaagagaaatcggtattgtttgtgaaagcgggattatagaaattgggggtattaaagccaaaaattatgattttaatcacgccttaaaaagcgagatttttgccctagatgaagaacaagaagaagcgcaaaaaacagccattcaaaacgctatcaaaaaccacgatagcatagggggtgtggctttgattagagcgaggagcataaaaaccaatcaaaagctccccattggcttaggtcaagggctatacgctaaattagacgctaaaatcgctgaagcgatgatggggcttaatggggtgaaagcggttgaaataggcaagggggtagaaagctctttattaaaaggctcagagtataatgatttaatggatcaaaaggggtttttgagcaatcgtagcggaggggttttagggggcatgagcaatggggaagaaatcattgttagagtgcatttcaaacccacgccaagcattttccaacctcaacgaaccatagacattaatggcaatgagtgcgaatgcttgttaaagggcaggcatgatccttgcattgcgattagagggagcgtggtgtgcgagagtttgttagcgttggtgttggctgatatggtattactcaatttgacttcaaaaatagagtatttaaaaacgatttataatgagaattaaacgaaattggatacaatcagcttaaaaaggata

SEQ ID NO: 56 - protein, 378 aa, Helicobacter pylori
MRLSSASKTEGSQMNTLGRFLRLTTFGESHGDVIGGVLDGMPSGIKIDYALLENEMKRRQGGRNVFITPRKEDDKVEITSGVFEDFSTGTPIGFLIHNQRARSKDYDNIKNLFRPSHADFTYFHKYGIRDFRGGGRSSARESAIRVAAGAFAKMLLREIGIVCESGIIEIGGIKAKNYDFNHALKSEIFALDEEQEEAQKTAIQNAIKNHDSIGGVALIRARSIKTNQKLPIGLGQGLYAKLDAKIAEAMMGLNGVKAVEIGKGVESSLLKGSEYNDLMDQKGFLSNRSGGVLGGMSNGEEIIVRVHFKPTPSIFQPQRTIDINGNECECLLKGRHDPCIAIRGSVVCESLLALVLADMVLLNLTSKIEYLKTIYNEN

SEQ ID NO: 57 - DNA, 588 bp, Helicobacter pylori
  CDS (20)...(535)
tcattgtgcctgaagccacatgcgctacatgctcatcaacgattattacaaggtgtttttgggcgaaaaagataaggatttgtatgtgaagcgcttggaaaaaatcacgcctaaaatctatctggcgagcgtgtttttagagaaacacacccctttaaaaagtcttttagaaaaaatccctaagggaaaaaaagagactatcacctatcataacccttgtcatgccaaaaaaaccctaaacgctcacaaagaagtgcgcaacttgctcaatttgcattatgaaattaaagaaatgccggacaattgttgcggttttggggggattacgatgcaaacacaaaaggcgggattttctttaaaagtggggcttcttagggctaaagaaatcatagacaccaaagctgcaattttgagcgctgaatgcggggcatgccatatgcaattaaacaacgctttaaagtctttagacgaccctaacactccgccatttttgcaccctttagaactcatcgctaaagccttaaaaagcgctgaataaaaagcctttttaaccccattctccaacatctttttatataatacagagct

SEQ ID NO: 58 - protein, 172 aa, Helicobacter pylori
MRYMLINDYYKVFLGEKDKDLYVKRLEKITPKIYLASVFLEKHTPLKSLLEKIPKGKKETITYHNPCHAKKTLNAHKEVRNLLNLHYEIKEMPDNCCGFGGITMQTQKAGFSLKVGLLRAKEIIDTKAAILSAECGACHMQLNNALKSLDDPNTPPFLHPLELIAKALKSAE

SEQ ID NO: 59 - DNA, 350 bp, Helicobacter pylori
  CDS (30)...(317)
ggcgttaaagctctgtattatataaaaagatgttggagaatggggttaaaaaggctttttattcagcgctttttaaggctttagcgatgagttctaaagggtgcaaaaatggcggagtgttagggtcgtctaaagactttaaagcgttgtttaattgcatatggcatgccccgcattcagcgctcaaaattgcagctttggtgtctatgatttctttagccctaagaagccccacttttaaagaaaatcccgccttttgtgtttgcatcgtaatccccccaaaaccgcaacaattgtccggcatttctttaatttcataatgcaaattgagcaaccttttgcattcttac

SEQ ID NO: 60 - protein, 96 aa, Helicobacter pylori
MLENGVKKAFYSALFKALAMSSKGCKNGGVLGSSKDFKALFNCIWHAPHSALKIAALVSMISLALRSPTFKENPAFCVCIVIPPKPQQLSGISLIS

SEQ ID NO: 61 - DNA, 1800 bp, Helicobacter pylori
  CDS (69)...(1718)
tcatcatctccacttctaatttaacctctaacgcccttaacgcaattgagcaaatcagaagcacaggaatggggattgacattgatgaaatcactgaagaggattttatctattctcgcattgattgggaaaagtttgatcccacaaaaacgcaagacgaaatccccttatgcgataagaaaaagccgcgctcgcatcaaacagaagccataaacgccactaaagagtatttttctgaccctaaaaacgctagaggcaagctcattatggcatgcgggacaggcaaaacctacacttctttaaaaatcatggaagctttagactctaagatcacgctttttctagcacccagcatcgctttgctttctcaaacttttagagaatacgcgcaagaaaaaagtgagccgttttacgcttctatcgtgtgcagcgatgataaagtcgggaaaagtaaagacgaagacaatgatgatattaaattttctgagctccctttaaagccctccactcgccttgaagacattttaagcgttcgaaaaaaagcgcaaaaagaaaacaagcgcttcattattttttcaacctatcaaagcgcgttgcgtattaaagaagcgcaagaagcgggtttgggcggaatcgatcttattatttgcgatgaagcccacagaacggtaggggctatgtattctagtaatgaaagggacgataaaaacgctttcacgctttgccatagcgataaaaatatcaaagcgaaaaaacgcctgtatatgaccgccacgcctaaagtttatagcgaaagctccaaagctaaagccaaagagagcgataatgttatctattctatggacgatgcagagatttttggcgaagaaatctatacgctcaatttttcaaaagcgatcgctttggatctcttaaccgattataaagtcatcattttagcggtgcgaaaagaaaatttaagcggcgttactaacagcgtgaataaaaagatcagccagctcaaagccgaaggcactaaattagataaaaagctcatcaataacgaatttgtttgtaagatcatcggcactcataaagggttagccaagcaggatttaatcgttttaaacgagaaaaacaaagaagatcacaacttgcaaaaccaatacgacaccgctccctctcaaagagccataaacttttgtaaaagcattaacacgagcaagaacattaaagactcctttgaaacgattatggaatgctatgatgaagagttgaagaaaaagagttttaaaaacctaaaaatcagcatcgatcacattgatggcaccatgaattgtaaggataggcttgaaaaattagaagagctcaatcaatttgagcccaacacttgcaaggttttaagcaacgccaggtgtttgagcgaaggggtggatgtcccagcgttagatagcatcgtcttttttgatggcaaaagcgctatggtggatattatccaagcggtgggtagggtgatgcgaaaagccaaacgcaagaaaagaggctatatcattttgcctatcgctttagaagagagtgaaatccaaaacctggatgaagccgtcaataacaccaatttcaaaaacatttggaaagtgataaaagccttaagaagccatgacccaagcctggttgatgaagccacttttaaagaaaaaatcaaaatctttggaagcgatgatggcaaccaatcacaacgatgaaaaaaccctttttgacgctatcttactgcaagatctagcggacgctatgtataatgtcatgcccactaaattaggggac

SEQ ID NO: 62 - protein, 550 aa, Helicobacter pylori
MGIDIDEITEEDFIYSRIDWEKFDPTKTQDEIPLCDKKKPRSHQTEAINATKEYFSDPKNARGKLIMACGTGKTYTSLKIMEALDSKITLFLAPSIALLSQTFREYAQEKSEPFYASIVCSDDKVGKSKDEDNDDIKFSELPLKPSTRLEDILSVRKKAQKENKRFIIFSTYQSALRIKEAQEAGLGGIDLIICDEAHRTVGAMYSSNERDDKNAFTLCHSDKNIKAKKRLYMTATPKVYSESSKAKAKESDNVIYSMDDAEIFGEEIYTLNFSKAIALDLLTDYKVIILAVRKENLSGVTNSVNKKISQLKAEGTKLDKKLINNEFVCKIIGTHKGLAKQDLIVLNEKNKEDHNLQNQYDTAPSQRAINFCKSINTSKNIKDSFETIMECYDEELKKKSFKNLKISIDHIDGTMNCKDRLEKLEELNQFEPNTCKVLSNARCLSEGVDVPALDSIVFFDGKSAMVDIIQAVGRVMRKAKRKKRGYIILPIALEESEIQNLDEAVNNTNFKNIWKVIKALRSHDPSLVDEATFKEKIKIFGSDDGNQSQR

SEQ ID NO: 63 - DNA, 2880 bp, Helicobacter pylori
  CDS (16)...(2814)
aagccttaagaagccatgacccaagcctggttgatgaagccacttttaaagaaaaaatcaaaatctttggaagcgatgatggcaaccaatcacaacgatgaaaaaaccctttttgacgctatcttactgcaagatctagcggacgctatgtataatgtcatgcccactaaattaggggacaggaattattgggaaaatttcactaaaaaaacgggcaacatcgcaaggaccttgaacaaccgcctaaaaattatttttgacaaaaaccctgaatttttccacggctttttggattccttaagggaaaatatccatcaaaacattaaagaagatgaagccttagacatgatcacttctcacatcatcactaagcccatttttgatgcactttttggggacaacatcaaaaaccctatcgctaaagccttggataaaatggtagaaaaactctccactttaggattagaaggagaaactaaagatctgaaaaacctctatgaaagcgtgaaaaccgaagccttgcacgccaaaagccaaaaaagccaacaagaactcattaaaaacctctacaacactttctttaaagaagcctttaaaaagcaaagcgaaaaactagggatcgtttatacgcccatagaggtggtggatttcattttaagagccactaacggcattttgaaaaagcatttcaacacggattttaacgatcaaagcatcacgatttttgacccattcaccggcaccgggagttttatcgctcgtttgctttctaaagaaaacgcgctcattagcgatgaagccttaaaagagaagtttcaaaaaaatttgttcgcttttgacatcgtgcttttgtcttattatatcgctttaatcaatatcacccaagccgcgcaaaatagggatggctcgttaaacaatttcaaaaacatcgcgctcacggacagcctggattatttagaagaaaaaaccaataaaggggtgctccctttatatgaggatttgaaagaaaacaaaggcatcaaagacactctagccaaccaaaatattagagtcatcatcggcaacccgccttattcagccggcgcaaagagccaaaacgataacaaccaaaacctctcacacccaaagcttgaaaaattagtttatgaaaaatacggaaaaaattccacatctagaagtgtgggaaaaaccacacgagacacgctcattcaaagcatccgcatggcgagcgatgttgttaaagataggggggtgataggctttgtggtgaacgggggttttattgactctaaaagcgcggatgggttcagaaaatgcgtggccaaagaattttcgcatctttatgtattgaatttgagaggcaatcagcgcacttctggggaagtgtcaaaaaaagagggagggaaaatctttgatagcggatcgagggcgacggtagcgattatcttttttgtgaaagataagagcactcctgataatacgattttttattatgaagtggaagattacttgaaaagagaagccaaactcaactggctcgccaattttgaaaatttggattttgtgccttttgagaaaatcaccccgaatgataaaggcgattggatcaaccaaaggaatgacgcttttgaaaaactcatccctttaaaaagagacaaaacactccaaaacgacagcgtttttgacatcaattctcttggcgtggtgagcggtcgtgatccttgggtgtataacttttctccaaacattttaacccaatcggtgcaaaaatgcattgacacttataacgctgatttgaagcgcttcaatgcgcgttttagggaagctttcaaacaacgcgctcaaagcgtcaaagcaggcgatctttacaaacaacttaatgataaagaaatcaccaccgataaaacgaaaatcgcttggactgatggtttgaaaaacaaactcattaaaaataaatctgcaagagaaagcagtgaggagcgtgtaaggttggccttgtatcgcccttttaacaaacaatggctttattgggataaggattggataaacaggcaaagagaattttcaaaaattttcccggataaagacgctcagaatgtggtgattaataccggtgtgggaaatggtaaagattttagcgctttggtaagcgattttatttctgattatagtttgatctcacccaatcaagcttaccccttgtattattacgatgatttggggaatcgccattacgccatcagcggctattgcttaaacctcttcaggaggcattatggggataatctgatcgctgaagaagagattttttattacatttatgcgattttccaccataaaggctatttagaaaaatacaaaaattccctcgccaaagaagcgccgcgcatcgctttgagcgaagattttaaagaactctctgtgcttggcaaagaattggccgaattgcacctgaactatgagagtggggaaatgcatgataatattaaatacaccacactgatgaacgccgaaatagagggttattatgatgtggataaaatgaccaaaaaaggggattgcatcatctataaccaaaacatcgctatcactaagatccctaaaaaagcctttgactatgtcattaatggcaagagcgcgattgactgggtgatcgaacgctatcaaaaaactatggataaagaaagcctgattgaaaacaacccgaacgattacgccggcggaaaatacgtttttgaactcctttgtagggtcatcacactttcggtaaaaagcgtggatttgatagaaaagatcagcgaaaagaggtttgagtgattacatcgcttgggggtgtggaatattttgaaaggcaatgtcttgctttcttaaaaaatccac

SEQ ID NO: 64 - protein, 933 aa, Helicobacter pylori
MTQAWLMKPLLKKKSKSLEAMMATNHNDEKTLFDAILLQDLADAMYNVMPTKLGDRNYWENFTKKTGNIARTLNNRLKIIFDKNPEFFHGFLDSLRENIHQNIKEDEALDMITSHIITKPIFDALFGDNIKNPIAKALDKMVEKLSTLGLEGETKDLKNLYESVKTEALHAKSQKSQQELIKNLYNTFFKEAFKKQSEKLGIVYTPIEVVDFILRATNGILKKHFNTDFNDQSITIFDPFTGTGSFIARLLSKENALISDEALKEKFQKNLFAFDIVLLSYYIALINITQAAQNRDGSLNNFKNIALTDSLDYLEEKTNKGVLPLYEDLKENKGIKDTLANQNIRVIIGNPPYSAGAKSQNDNNQNLSHPKLEKLVYEKYGKNSTSRSVGKTTRDTLIQSIRMASDVVKDRGVIGFVVNGGFIDSKSADGFRKCVAKEFSHLYVLNLRGNQRTSGEVSKKEGGKIFDSGSRATVAIIFFVKDKSTPDNTIFYYEVEDYLKREAKLNWLANFENLDFVPFEKITPNDKGDWINQRNDAFEKLIPLKRDKTLQNDSVFDINSLGVVSGRDPWVYNFSPNILTQSVQKCIDTYNADLKRFNARFREAFKQRAQSVKAGDLYKQLNDKEITTDKTKIAWTDGLKNKLIKNKSARESSEERVRLALYRPFNKQWLYWDKDWINRQREFSKIFPDKDAQNVVINTGVGNGKDFSALVSDFISDYSLISPNQAYPLYYYDDLGNRHYAISGYCLNLFRRHYGDNLIAEEEIFYYIYAIFHHKGYLEKYKNSLAKEAPRIALSEDFKELSVLGKELAELHLNYESGEMHDNIKYTTLMNAEIEGYYDVDKMTKKGDCIIYNQNIAITKIPKKAFDYVINGKSAIDWVIERYQKTMDKESLIENNPNDYAGGKYVFELLCRVITLSVKSVDLIEKISEKRFE

SEQ ID NO: 65 - DNA, 1440 bp, Helicobacter pylori
  CDS (24)...(1370)
aagatcagcgaaaagaggtttgagtgattacatcgcttgggggtgtggaatattttgaaaggcaatgtcttgctttcttaaaaaatccacaaactaatccacaaaatgagcaatacattccaggagtgttttcgtatcaagaaaacaaaatttctttttcttttttggttttaggagaaattgaagagatccactctttgcaataccaaacgctctatattgtggataacaaaaaaagatacactctttacaagctttatgatcgcattattttgggtcatactttagggtattctgcaccaatcacgctctattatgaatggctgtttgatgattggatcgatccagaaaaaattatgggcgatcgttttgtttgtaggacaaattatttagaaagtttttttacgaccaagaagcatttgctacctgatacattatttaaagtagatgaaagtgggtgtgaaagttatcatgagaataacgataaggactttatcctacaatcattttatattcaaaatgattttttatcccaaagatatgaaaaagacaagataaaagcaaaatctaatttgattcctaaaagacagaatcgtttattaacttatcaatttgatttgtctttggaatgcaatataatttttgaaacccttgaaaaattagcacttattgctggagcgattaaaaacttttttattttgatttatgctcattctaattttgacatccaaattgactatatccaattcaagctttctaataaagacattacagcaataagaaacacttacaaaaaagataaaaagtctatggagatagatctttatgggattgctataaatttccaacggatagacaatttttctgtaatacttgaaaaatggattgttttttatatcaaagacaatagagatttccaacttgcaagtattttagacattattaataaaaaagatccaattattcacttgtatttggacatgtttgtattgattagcatgattgaaagttttttaaagaaaccacaacaaacaaaactccatgaaaaactctctgaattttttaaaatttcattatctaggacaaaatgcgatcaaacgaaaaattattttaatgataaatgtcaagaagatctaatccaacagattgttgactgccgtaactctctagcgcacggaagaagtttaaagcttgatacaaacaaagctacagacattagccatgcttttatagatttcaagcaaattgtcattgaatttttctttggcgagataggattgagcgattttattacaaacaattttggttttcttaacaaagttaaattaagaaaccccccaaaaacagaaaaaatcaccgagccaaaccgctaaaaccccttagaaaatttaaaattttaagttttaggggtgtttttcttaagaatttaggttttttata

SEQ ID NO: 66 - protein, 449 aa, Helicobacter pylori
VITSLGGVEYFERQCLAFLKNPQTNPQNEQYIPGVFSYQENKISFSFLVLGEIEEIHSLQYQTLYIVDNKKRYTLYKLYDRIILGHTLGYSAPITLYYEWLFDDWIDPEKIMGDRFVCRTNYLESFFTTKKHLLPDTLFKVDESGCESYHENNDKDFILQSFYIQNDFLSQRYEKDKIKAKSNLIPKRQNRLLTYQFDLSLECNIIFETLEKLALIAGAIKNFFILIYAHSNFDIQIDYIQFKLSNKDITAIRNTYKKDKKSMEIDLYGIAINFQRIDNFSVILEKWIVFYIKDNRDFQLASILDIINKKDPIIHLYLDMFVLISMIESFLKKPQQTKLHEKLSEFFKISLSRTKCDQTKNYFNDKCQEDLIQQIVDCRNSLAHGRSLKLDTNKATDISHAFIDFKQIVIEFFFGEIGLSDFITNNFGFLNKVKLRNPPKTEKITEPNR

SEQ ID NO: 67 - DNA, 1345 bp, Helicobacter pylori
  CDS (25)...(1302)
ctaaatgaatttaaaaggaaaaatatggcagtaagatttgggattatctttatatctgactctattgatgattataaagccaaacaattaagatcaattttagaacgcaagaaagagtgtaattttatatggtttaatgaatcaagtgctataattcacaatactcctaaagtttttgaaggagagagtttttttgatcatcttttcgttagtgcaaaaattactgcttttgtggtatccacaaacgaatcagatacaatattcaatttaaaaaactacttgctagtattagccaaaaatctcaataatagagatatttggtattgtgaaaacactatttgcgataaaaaaggcacttataatatagaaatagaattagtgagcaatgctaatgattttagaggagtgtttggagaagtgttaggtatagtcaaagacactttcggtgatttactgcaacttcttacaaatttaaagaacaaggaaattgaatttaattttcataaaaaaattaattacggattgccttttgggattatctttatcgctagcaactctgacaaccctattgatattgacaataaaaccaaaaagttaaaatcatgctttcgtgatgatgagagtaactgttttattgactgcccaattacaattgaggattatttaattttagataatctaaaaagctgttttgtaatccaaaataagccaaatgtaacattatttgataacgacgagaacgatagaccattcaatttaaagcgatacttgttaggattgaaagaaaagttagggtttgagccaacgggtattttctattgcgaaaacgcaaacacacacaaaattgaattgattggtaatgattctgatttcagagaggtattacttgaattttcagagaatataccaaaagcccctaatgaactaccacaatttcttacaaactttaaaaattcaaaaatccccaatggaaacatttcattttcgccaccaaaaaattctccatcaatttcttcatatgctttatctgataagattaaaagagaagtaagagatacctttgatcgctatttgtggcatggttattctaaaattccacaggagaaaaggatagccaaaataaaagagcaagtgaaggaagaaattaaactaaatccttcttttcgtaattatagagtagactctgaacaaaaccgcaagatcaatgaaattgctgagggtttaaaaagtggtaagataattggtaaaaaggttattgctaatgcgttcgatctaaatgctagcttattgttttattactcctgatgatttaaagaatttaaaggaacgattatttatagatatt

SEQ ID NO: 68 - protein, 426 aa, Helicobacter pylori
MAVRFGIIFISDSIDDYKAKQLRSILERKKECNFIWFNESSAIIHNTPKVFEGESFFDHLFVSAKITAFVVSTNESDTIFNLKNYLLVLAKNLNNRDIWYCENTICDKKGTYNIEIELVSNANDFRGVFGEVLGIVKDTFGDLLQLLTNLKNKEIEFNFHKKINYGLPFGIIFIASNSDNPIDIDNKTKKLKSCFRDDESNCFIDCPITIEDYLILDNLKSCFVIQNKPNVTLFDNDENDRPFNLKRYLLGLKEKLGFEPTGIFYCENANTHKIELIGNDSDFREVLLEFSENIPKAPNELPQFLTNFKNSKIPNGNISFSPPKNSPSISSYALSDKIKREVRDTFDRYLWHGYSKIPQEKRIAKIKEQVKEEIKLNPSFRNYRVDSEQNRKINEIAEGLKSGKIIGKKVIANAFDLNASLLFYYS

SEQ ID NO: 69 - DNA, 720 bp, Helicobacter pylori
  CDS (22)...(705)
ttgctaatgcgttcgatctaaatgctagcttattgttttattactcctgatgatttaaagaatttaaaggaacgattatttatagatattatcaatgctatcaaccaaaaaaagagagtcgcgctcgatcatgctcaaatagatgacatccagtataatgtgcttgataatgcgttttattttatctttgatgttggtaacccttctcaattagctattaaagtgcctagaaaatctttagaaaatgatgagttgcccaacactaaaaaaaacatattcaatggattaataagaactatctatgggtgtattgatgatgaaaattcatttttattagaaaacgataaaaccatcaaggatttaaatattcaggatttattggggccattaaaaactcaagcatttccattatcatacattattactgacgctatcaatcaaaaagaaggggtggctctcgattacgctctaataaacgatattaagtataatttgcttgataacacattccattttatctttgatgttggtaatcctttgttgaaagagtcaagtcaatttattattgaagtgcctagagaggcgttggatctagagaatgttgatcggcttgttgaatatacgctgtctcctaataatcatagtcaaagttctttagtgtatcatatttctgaaggctcttatatcattcacttaatagatgactaaacttaaatgaaa

SEQ ID NO: 70 - protein, 228 aa, Helicobacter pylori
MLAYCFITPDDLKNLKERLFIDIINAINQKKRVALDHAQIDDIQYNVLDNAFYFIFDVGNPSQLAIKVPRKSLENDELPNTKKNIFNGLIRTIYGCIDDENSFLLENDKTIKDLNIQDLLGPLKTQAFPLSYIITDAINQKEGVALDYALINDIKYNLLDNTFHFIFDVGNPLLKESSQFIIEVPREALDLENVDRLVEYTLSPNNHSQSSLVYHISEGSYIIHLIDD

SEQ ID NO: 71 - DNA, 611 bp, Helicobacter pylori
  CDS (25)...(561)
tttgggcatgcttggtgatcttaaatgagtcaaggtgatggggtggaaggaaataatatggatactacgaaagagaacttgaatggctcaaaagagcgtttgagcgattgggaatatcgatgggcaatggctctagtctatggaggatgtatctccataaccactaggattttttatgacataaatggttcagctagcgatccgctttttgaccctaaatacagctattatgtgtggttagtggctctaatagcggctttgttgtctaatctcttgtttaatcctaaaggcaggtcggtaggttatttaatgattgaaacttggcaagggttccccaagttttttaaagccatttttaaggctaggttttttggtgcgttttatgacgctgtgttaggatcaaggctaagggatttttatgtgatgcttttaacgatgccctttattgccgctatccatgaggtttcggcgtattgtgggcatcctagcaatctccttgtagagggtttggtcattttggggtttcaaggttttcttaagctttgcgctaaatgggggtggtgatttaacccaaatgtcattaaatggagggggtataaaaaaattaaaaa

SEQ ID NO: 72 - protein, 179 aa, Helicobacter pylori
MSQGDGVEGNNMDTTKENLNGSKERLSDWEYRWAMALVYGGCISITTRIFYDINGSASDPLFDPKYSYYVWLVALIAALLSNLLFNPKGRSVGYLMIETWQGFPKFFKAIFKARFFGAFYDAVLGSRLRDFYVMLLTMPFIAAIHEVSAYCGHPSNLLVEGLVILGFQGFLKLCAKWGW

SEQ ID NO: 73 - DNA, 424 bp, Helicobacter pylori
  CDS (72)...(404)
gttgtggtataaatattcttatcaaggtgtgccaaacatgccttgaatctcaatttttgaatctcaattttatgaaaggatttgttatgagtggattaagaacatttagttgtgtagtggttttatgcggtgcaatggctaatgtggctatagctagtcctaaaatagaggcaaggggtgaattaggcaaatttatagggggtggtgttgggggttttgttggtgataaaatgggcggatttgttggtggtgcaataggaggatatattgggtctgaaataggcgatagggtagaagattatatccgtggtgttgatagagagccacaaaacaaagaaccacaagccccaagagaacctatccgtgatctttatgattacggctatagttttgggcatgcttggtgatcttaaatgagtcaaga

SEQ ID NO: 74 - protein, 111 aa, Helicobacter pylori
MKGFVMSGLRTFSCVVVLCGAMANVAIASPKIEARGELGKFIGGGVGGFVGDKMGGFVGGAIGGYIGSEIGDRVEDYIRGVDREPQNKEPQAPREPIRDLYDYGYSFGHAW

SEQ ID NO: 75 - DNA, 630 bp, Helicobacter pylori
  CDS (132)...(569)
gattttagtgatgacgagtttcacccgtttgatcgtggtgttttcttttttaaggaccgctttgggcacgcaacaaacccccccccactcaaattttagtctcgctctctttgatattgacttttttcatcatggaacctagcctaaaaaaggcctatgatacagggattaagccttatatggataaaaagatttcttacaccgaagcgtttgaaaaaagcgctctgcccttcaaggaattcatgcttaaaaacacacgagaaaaggatctagcccttttttttaggattagaaacctccctaaccctaaaacccctgatgaggtgagtttgagcgttttgatcccggcatttatgataagcgagttgaaaacagcgtttcaaatcggctttttactctacttgccttttttggtgattgatatggtgatcagctctattttaatggcgatgggcatgatgatgctcccgcctgtaatgatttctctgccttttaaaattttagtgtttattctggtagatgggtttaatttattgaccgaaaatttagtggcgagttttaaaatggtttgatattaacaagcattcaagcgataaaagcttgaagctagtttaaaactcataattcaaa

SEQ ID NO: 76 - protein, 146 aa, Helicobacter pylori
MEPSLKKAYDTGIKPYMDKKISYTEAFEKSALPFKEFMLKNTREKDLALFFRIRNLPNPKTPDEVSLSVLIPAFMISELKTAFQIGFLLYLPFLVIDMVISSILMAMGMMMLPPVMISLPFKILVFILVDGFNLLTENLVASFKMV

SEQ ID NO: 77 - DNA, 2352 bp, Helicobacter pylori
  CDS (13)...(2313)
aaaaggtggtaaatgaaaagaattttagtctctttggctgttttgagtcatagcgcgcatgctgtcaaaactcataatttggaaagggtggaagcttcaggggtggctaacgataaggaagcgcctttaagctggaggagcaaggaagtgagaaactatatgggatctcgcacggtgatttctaacaagcaactcactaaaagcgccaatcagagcattgaagaagctttgcaaaatgtgccaggcgtgcatattagaaacgctacgggtattggagctgtgcctagcttttctgttaggggctttggtgggggaagttcagggcattccaatacggctatggttttagtcaatgggatccctatttatgttgcgccctatgttgatattagcattcctattttccctgtaacctttcaatctgtagatagaatcagcgtaaccaagggtggggagagcgtgcgttatggccctaatgtttttggcggtgtgattaatgtgatcactaagggcattcctaccaagtgggagagtcaggtgagcgagagggccactttttggggcaaatctgaaaatgggggctttttcaatcaaaattctaaaaaccttgacaaaagcttagccaataacatgctttttgacacttacttaagaacagggggcatgatgaataagcattttggaatccaagctcaagccaactggcttaaagggcaagggtttagatacaacagccctacgaacattcaaaactacatgctagattccttgtatcaaattaatgatagtaataagatcactgcttttttccaatactataattattttatggcagaccccggatctttaggcatagaagcgtataatcaaaatcgttttcaaaacaaccgccctaataacaataaaagcgggagagcgaagcgrtggggagctgtgtatcaaaacttttttggggatacggacaaaataggtggggatttcacttttagttactatgggcatgacatgtcaagggattttcaatttgattctaattttttgaatgtcaataccaatcctaaattaggccctgtttataccgatcaaaattatccaggattttttatttttgatcatttaaggcgttacataatgaacgcttttgagcctaatttgaacttagttgtcaataccaataaagttaagcaaacttttaatgtgggcatgcgttttatgacaatggatatgtatttcagattggatcaaagcacatgcgaaaaaaccgatatttttaatggggtgtgccgcatgcctccttttgttctttctaaaaaacccagcaacaatcaaaacctgtttaacaactatacagcggtatggttgagcgataaaatagagctttttgattctaaattggtgataactccagggcttagatacacttttttgaactataacaacaaagagccagaaaagcatgatttttctgtgtggaatattacaaaaaagcgtcaaaacgaatggagtcccgcccttaacattggctataaacctatggaaaattggatatggtatgcgaactaccgccgcagttttatccccccacaacatacaatgctaggcattactaggactaattacaaccaaatttttaatgaaattgaagtggggcaacgctatagttataaaaatctattgagctttaacacgaattattttgtgatttttgccaagcgttactatgcgggaggctatagcccacagcctattaacgctaggagtcaaggggtagaattggaattgtattacgcgccgattaggggtttgcaattccatgtggcttacacctatattgatgcacgcatcacttctaacgctgatgatattgcttattattttacaggcattgtcaataaaccctttgacattaaagggaagcgtttgccttatgtgagtcctaaccaattcatatttgacatgatgtatacttacaagcacacgacttttggtattagcagctatttttatagccgtgcttatagttctatgctcaatcaggccaaaagccaaaccgtgtgcctgcccttaaacccagaatacacaggggggctagagtatggttgtaattcagtagggttattgcccttgtattttgtgttgaacgttcaagtaagctcggttttatggcaaagcggtaggcataaaatcacagggagtttgcaaatcaataatctttttaacatgaagtattattttaggggaattggcacaagccctacaggaagagagcccgcaccagggcgatccattacagcgtatttgaattatgagttttaaactagcttcaagcttttatcgcttgaatgcttgtta

SEQ ID NO: 78 - protein, 767 aa, Helicobacter pylori
  VARIANT 304: Xaa = Any Amino Acid
MKRILVSLAVLSHSAHAVKTHNLERVEASGVANDKEAPLSWRSKEVRNYMGSRTVISNKQLTKSANQSIEEALQNVPGVHIRNATGIGAVPSFSVRGFGGGSSGHSNTAMVLVNGIPIYVAPYVDISIPIFPVTFQSVDRISVTKGGESVRYGPNVFGGVINVITKGIPTKWESQVSERATFWGKSENGGFFNQNSKNLDKSLANNMLFDTYLRTGGMMNKHFGIQAQANWLKGQGFRYNSPTNIQNYMLDSLYQINDSNKITAFFQYYNYFMADPGSLGIEAYNQNRFQNNRPNNNKSGRAKXWGAVYQNFFGDTDKIGGDFTFSYYGHDMSRDFQFDSNFLNVNTNPKLGPVYTDQNYPGFFIFDHLRRYIMNAFEPNLNLVVNTNKVKQTFNVGMRFMTMDMYFRLDQSTCEKTDIFNGVCRMPPFVLSKKPSNNQNLFNNYTAVWLSDKIELFDSKLVITPGLRYTFLNYNNKEPEKHDFSVWNITKKRQNEWSPALNIGYKPMENWIWYANYRRSFIPPQHTMLGITRTNYNQIFNEIEVGQRYSYKNLLSFNTNYFVIFAKRYYAGGYSPQPINARSQGVELELYYAPIRGLQFHVAYTYIDARITSNADDIAYYFTGIVNKPFDIKGKRLPYVSPNQFIFDMMYTYKHTTFGISSYFYSRAYSSMLNQAKSQTVCLPLNPEYTGGLEYGCNSVGLLPLYFVLNVQVSSVLWQSGRHKITGSLQINNLFNMKYYFRGIGTSPTGREPAPGRSITAYLNYEF

SEQ ID NO: 79 - DNA, 888 bp, Helicobacter pylori
  CDS (19)...(837)
agataggaatgtaaaggaatggaatttatgaaaaagtttgtagctttagggcttctatccgcagttttaagctcttcgttgttagccgaaggtgatggtgtttatatagggactaattatcagcttggacaagcccgtttgaatagtaatatttataatacaggggattgcacagggagtgttgtaggttgccccccaggtcttaccgctaataagcataatccaggaggcaccaatatcaattggcatgctaaatacgctaatggggctttgaatggtcttgggttgaatgtgggttataagaagttcttccagttcaagtcttttgatatgacaagcaagtggtttggttttagagtgtatgggctttttgattatgggcatgccactttaggcaagcaagtttatgcacctaataaaatccagttggatatggtctcttggggtgtggggagcgatttgttagctgatattattgataacgataacgcttcttttggtatttttggtggggtcgctatcggcggtaacacttggaaaagctcagcggcaaactattggaaagagcaaatcattgaagctaagggtcctgatgtttgtacccctacttattgtaaccctaacgctccttatagcaccaaaacttcaaccgtcgcttttcaggtatggttgaattttggggtgagagccaatatttacaagcataatggcgtagagtttggcgtgagagtgccgctactcatcaacaagtttttgagtgcgggtcctaacgctactaatctttattaccatttgaaacgggattattcgctttatttagggtataactacactttttaaaccctttaaaagggtgtctttaagccctttttagtccttataaaaagg

SEQ ID NO: 80 - protein, 273 aa, Helicobacter pylori
MEFMKKFVALGLLSAVLSSSLLAEGDGVYIGTNYQLGQARLNSNIYNTGDCTGSVVGCPPGLTANKHNPGGTNINWHAKYANGALNGLGLNVGYKKFFQFKSFDMTSKWFGFRVYGLFDYGHATLGKQVYAPNKIQLDMVSWGVGSDLLADIIDNDNASFGIFGGVAIGGNTWKSSAANYWKEQIIEAKGPDVCTPTYCNPNAPYSTKTSTVAFQVWLNFGVRANIYKHNGVEFGVRVPLLINKFLSAGPNATNLYYHLKRDYSLYLGYNYTF

SEQ ID NO: 81 - DNA, 560 bp, Helicobacter pylori
  CDS (37)...(522)
cacggtcattttgtctgtgtttttagtcgcgtattcatgcaactgcttatggaacgcctttctcttgtcttcaggcatcttttccatgcgctttttcaactcttttgtgtaatccacaatatcctgcggagkacaacgccagccattttagccaaatcttcatcgcttgttttgctgaaatctttggcgttcaaagccacaaatagcaacgcgctaacagaaagtattttcaacgcttttttcattttttatccttttaaattaaatttatctcacttaggagagcaatgctcgtcttttttcttaacagccctacaccaaacttttctcgtatcgccgctgcaaacgctcacattaagtccttttgccttgatttcttcatcgctcaaacctttggttttttcttctaattctttacgcacttcttcacgcatttttttgaaatccttcgctcattttggaaagattcttcctagcgatccggctgaaattcgcgcggaatttcttagcgtcctcagcgtttaaagttttaaggcgtttagacacttccatgcgataat

SEQ ID NO: 82 - protein, 162 aa, Helicobacter pylori
  VARIANT 32: Xaa = Any Amino Acid
MQLLMERLSLVFRHLFHALFQLFCVIHNILRXTTPAILAKSSSLVLLKSLAFKATNSNALTESIFNAFFIFYPFKLNLSHLGEQCSSFFLTALHQTFLVSPLQTLTLSPFALISSSLKPLVFSSNSLRTSSRIFLKSFAHFGKILPSDPAEIRAEFLSVLSV

SEQ ID NO: 83 - DNA, 1196 bp, Helicobacter pylori
  CDS (41)...(1132)
aaggcatccaccattaaccctttttaaatttattttaacgatgttttactatactataaaatcttttaatttcaaaaggtggtccataatgagaatatttttgaaattgttgattcttttattttgtttgaaggggcaggttatggctcaaaatttacccaccattgctttactggcgacaggggggacgattgcagggagtggtgcgagcgcgagtttgggtagttataagagtggtgagttgggcatcaaagagcttttgaaggctatccctagtcttaacagactcgctcgcattcaaggggagcagatttctaacatcggctcacaagacatgaatgaagaggtatggttcaagctcgccaaacgtgcccaagaattgctagatgatagccgtattcaaggcgtggtcatcacgcatggcacggacactttagaagagagcgcgtattttttaaacttagttttacgctccacaaaaccggtcgtgctggtgggagcgatgcgtaatgctgcttctttgagcgcggatggggctttgaatttatataatgctgtgagcgtagcgctcaatgaaaaaagtgcgaataaaggcgtgttagtggtgatggacgataatatttttagcgctagagaagtgattaaaacgcacaccacccacacttccacctttaaagccttaaatagcggcgcgatagggagcgtgtattatggcaaaacgcgctattacatgcagcctttgagaaaacacaccacagagagcgaattttccctttcacaactcaaaacccccctgcctaaagtggatattatttacacgcatgctggcatgacccctgatttattccaagcgagcctaaactcgcatgcaaaaggcgttgtgatagccggggtgggtaatgggaatgtgagcgctgggtttttaaaagcgatgcaagaagcgagccaaatgggggtggttattgttcgttctagcagggtaaatagcggtgagattacttcaggcgagattgatgacaaggccttcatcacaagcgacaatttaaacccccaaaaagctagggtgcttttacaactcgctttaactaaaacaaataataaagaaaaaatccaagaaatgtttgaagagtattgaaagattctcttaaatcacccaattatcaaagataattgggtgatttggtttattttgtttt

SEQ ID NO: 84 - protein, 364 aa, Helicobacter pylori
MFYYTIKSFNFKRWSIMRIFLKLLILLFCLKGQVMAQNLPTIALLATGGTIAGSGASASLGSYKSGELGIKELLKAIPSLNRLARIQGEQISNIGSQDMNEEVWFKLAKRAQELLDDSRIQGVVITHGTDTLEESAYFLNLVLRSTKPVVLVGAMRNAASLSADGALNLYNAVSVALNEKSANKGVLVVMDDNIFSAREVIKTHTTHTSTFKALNSGAIGSVYYGKTRYYMQPLRKHTTESEFSLSQLKTPLPKVDIIYTHAGMTPDLFQASLNSHAKGVVIAGVGNGNVSAGFLKAMQEASQMGVVIVRSSRVNSGEITSGEIDDKAFITSDNLNPQKARVLLQLALTKTNNKEKIQEMFEEY

SEQ ID NO: 85 - DNA, 678 bp, Helicobacter pylori
  CDS (37)...(612)
  misc_feature 495: n = A,T,C or G
agtaaaacatcgttaaaataaatttaaaaagggttaatggtggatgcctttttccaaattgcagtgttacttttttcgctttttttaggggcaaggctagggggcttgggagtgggctatgcggggggcttgggcgtgcttattttatgcttatttttggggctaaatccgggcaaaatcccttttgatgtgattttaatcatcatggcagtcattagcgctattagcgcgatgcaaaaagcggggggcttggattacttagtcaaaatcgctgaaaaaattttaaggaaacaccccaagcaaatcaattaccttgcgccaagcgtggcgtattgtttaacgatactagccggcaccgggcatacggttttttccttgatcccggtgattgtggaagtgagccagagccaaaacatcaagcctaaagcgcctttaagcttagcggtagtctctagtcaagtcgctattactgcaagcccggtgagcgcagcggtnggtgtttatgagcggcattttagagcctttaggagcaaattacttgacccttttaatggtttggatccctacgacttttttagcatgcatgctcacggcatttattatgggttttactgatttgaaattagacagcgatccgcattatttagagcgcttgaaagcgggcaaaatctcgccccc

SEQ ID NO: 86 - protein, 192 aa, Helicobacter pylori
  VARIANT 153: Xaa = Any Amino Acid
MVDAFFQIAVLLFSLFLGARLGGLGVGYAGGLGVLILCLFLGLNPGKIPFDVILIIMAVISAISAMQKAGGLDYLVKIAEKILRKHPKQINYLAPSVAYCLTILAGTGHTVFSLIPVIVEVSQSQNIKPKAPLSLAVVSSQVAITASPVSAAXGVYERHFRAFRSKLLDPFNGLDPYDFFSMHAHGIYYGFY

SEQ ID NO: 87 - DNA, 1038 bp, Helicobacter pylori
  CDS (22)...(1005)
aaaactttgatatgagaataaatggactttaaaaataaaaaatggctttttctagcccctttagcaggctatacggatttgcctttcaggagcgtggtgaaaaaatttggcgtggatgttaccacgagcgaaatggtgagctcgcattcgttggtgtatgcgtttgataaaacttctaaaatgttggaaaaatcccctttagaagatcatttcatggcgcaaatttcaggctctaaagaaagcgtagtcaaagaagcggtggagaaaatcaacgctttagagcatgtgaatgggattgattttaattgcggttgtcccgctcctaaagtggctaatcatggtaatggtagtgggttattgaaggatttaaaccacttagtgaagcttttaaaaaccatcagagaaaacactagtaaaaaaatcacaagcgtgaaagtgcgtttaggctttgaaaagaaaatccctaaagaaatcgctcatgccctaaatgacgcaccggtggattatgtggtggtgcatgggaggacacgaagcgataaataccaaaaagacaaaatagattacgaaagcatcgctttaatgaaaaagattttaaaaaagccggtgatagccaatggcgaaattgacagcgtgaaaaaggcttttgaagttttacaaatcactcaagcggatgggctaatgatagggcgagcggccttaagagccccatggatattttggcaaatcagaaacaacaccacaaaattacccgcagtcgtgaaaaaagacctggttttagaacattttgataaaatggtggagttttatggggatatgggggtaatcatgtttaggaaaaatttgcatgcttacgctaagggcgaaatgcaagcgagcgcgtttcgtaactgcgtcaatacccttacagaaataaagagcatgcgagagagcatagaggaattttttaatcaagaaatgttgcaaagtgaagtgccgttatgggtagaattgaatcaaaaaagcgtttgaaagcgcttgtttttttagccagcttggggg

SEQ ID NO: 88 - protein, 328 aa, Helicobacter pylori
MDFKNKKWLFLAPLAGYTDLPFRSVVKKFGVDVTTSEMVSSHSLVYAFDKTSKMLEKSPLEDHFMAQISGSKESVVKEAVEKINALEHVNGIDFNCGCPAPKVANHGNGSGLLKDLNHLVKLLKTIRENTSKKITSVKVRLGFEKKIPKEIAHALNDAPVDYVVVHGRTRSDKYQKDKIDYESIALMKKILKKPVIANGEIDSVKKAFEVLQITQADGLMIGRAALRAPWIFWQIRNNTTKLPAVVKKDLVLEHFDKMVEFYGDMGVIMFRKNLHAYAKGEMQASAFRNCVNTLTEIKSMRESIEEFFNQEMLQSEVPLWVELNQKSV

SEQ ID NO: 89 - DNA, 1170 bp, Helicobacter pylori
  CDS (24)...(1130)
tcaaaaattaaaggttaattttaatgttgcttttcactccaggccctgtagccattaatgaagagatgcgcacaagcttttctcagccaatgccccaccaccgcactaaagattttgaaaagattttccaaagcgtgcgagaaaatttgaaaaaaatgaccggtttagaagaggttttgcttctaagcagcagcgggacaggggctatggaagcgagcgtgatttccttgtgtcaaaaagagttgctttttgttaatgcgggcaagtttggcgaaaggtttggcaagatcgctaaagcccattctatcaaagcccatgaattagtctatgaatgggacacaccagctcaagtagatgaaatattaagcgttcttaaagccaaccctaacattgatgcgttttgcattcaagcatgcgagtctagtggggggttacgacaccctgtggaaaaaatcgctcaagcgatcaaagaaactaacccgaatgtttttgtaattgtagatgctatcaccgctttaggggttgagcctttagaaataacgcatgttgatgcgctcattggagggagtcaaaaagcgttcatgctgcctcctgcgatgagcctagtcgcattgagccagaatgcaattgagcgtatagaagaacgcaatgtggggttttatttcaatttaaagagcgaattgaaaaaccaaaggaataacaccacaagctacaccgctcctattttacacactttagggttgcaacgctattttgaattggtgcaaaatttagggggctttgaagcgctctatagagagactaaaaaagccgctttggccactcaaaaagccgttttagctttaggtttaaagattttccctaaaagcccaagcttgagcatgacaacgattgttaatgagcatgccaaagaattgagaaaccttttaaaagaaaaataccaggtgcaatttgcgggcggtcaagagccttataaagatgcgctcattcgtatcaaccacatggggatcattcctgtttataaaagcgcttacgctttaaacgccctagagttagccctaaacgacttggatttaagggaatttgatggcgtggcgaacgcaacttttttaaagcaatattatggaatttaaggatcacaatgcattattcttatgaaacctttttaaa

SEQ ID NO: 90 - protein, 369 aa, Helicobacter pylori
MLLFTPGPVAINEEMRTSFSQPMPHHRTKDFEKIFQSVRENLKKMTGLEEVLLLSSSGTGAMEASVISLCQKELLFVNAGKFGERFGKIAKAHSIKAHELVYEWDTPAQVDEILSVLKANPNIDAFCIQACESSGGLRHPVEKIAQAIKETNPNVFVIVDAITALGVEPLEITHVDALIGGSQKAFMLPPAMSLVALSQNAIERIEERNVGFYFNLKSELKNQRNNTTSYTAPILHTLGLQRYFELVQNLGGFEALYRETKKAALATQKAVLALGLKIFPKSPSLSMTTIVNEHAKELRNLLKEKYQVQFAGGQEPYKDALIRINHMGIIPVYKSAYALNALELALNDLDLREFDGVANATFLKQYYGI

SEQ ID NO: 91 - DNA, 285 bp, Helicobacter pylori
  CDS (46)...(270)
aagaggcatgacagctcttacattgtgatagacgaattagtgggcatgtggttggcgatggcgattagcgggttatcgttagcgggtgtgatcttgagttttatcttttttaggatctatgatattactaaaccctcactcattggcaagatagataaagaagttaaagggggcttaggggttgtggctgatgacgctttagcgggtgttttagccggattgagcgcgttattagtcatccatattttaggattttttaacattaaactttaattttaagaaaat

SEQ ID NO: 92 - protein, 75 aa, Helicobacter pylori
MWLAMAISGLSLAGVILSFIFFRIYDITKPSLIGKIDKEVKGGLGVVADDALAGVLAGLSALLVIHILGFFNIKL

SEQ ID NO: 93 - DNA, 1021 bp, Helicobacter pylori
  CDS (70)...(957)
aaagataggattaaatattttatttttttagatgaaaaccatcatttttatttgattgaagaatccaacatgcattcaaaatacttcgctcaaatcaaagaaaaaaaattacctcccctaatcctcacacacaatggcttgcttaaaaactcatttttaggtgctaagattatagaattgcctttagtgatcaatctcgtgcatgggggcgatggcgaagatgggaaattagcgagcttgttagaattttatcgtatcgcttttataggccctaggattgaagcgagcgtgctgagttataacaaatatttaaccaagctttacgccaaagacttaggggtaaagactttagatcatgttcttttgaatgaaaaaaaccgcgctaacgccttggatttgatgaactttaatttccctttcataatcaagcctaataacgccggaagctctttaggggtgaatgttgtgaaagaagaaaaagaattggtttacgctttagacggtgcgtttgaatattctaaagaggtcttgatagagcctttcattcagggagtgaaagaatacaatttggccggttgcaagatcaaaaaggatttttgtttttcctatgtggaagagcctaacaaacaggaatttttagatttcaaacaaaaatatttggatttttcacgcaataaagcccctaaagcgaatctttctaacgccctagaagagcaattaaaagaaaattttaaaaaactctataacgatttgtttgatggcgcgatcattcgttgcgatttttttgtcataaaaaatgaagtgtatcttaatgagatcaaccccattcctggcagtttggccaattatttgtttgatgattttaaaacaacgctagaaaatttagcgcaatcattacccaaaacccctaagatccaaatcaaaaactcttatttgttgcaaatccaaaagaataagtaatggccaaacgcagtatcgcttatttggatagcgtttttgacatttcctacacttttataga

SEQ ID NO: 94 - protein, 296 aa, Helicobacter pylori
MHSKYFAQIKEKKLPPLILTHNGLLKNSFLGAKIIELPLVINLVHGGDGEDGKLASLLEFYRIAFIGPRIEASVLSYNKYLTKLYAKDLGVKTLDHVLLNEKNRANALDLMNFNFPFIIKPNNAGSSLGVNVVKEEKELVYALDGAFEYSKEVLIEPFIQGVKEYNLAGCKIKKDFCFSYVEEPNKQEFLDFKQKYLDFSRNKAPKANLSNALEEQLKENFKKLYNDLFDGAIIRCDFFVIKNEVYLNEINPIPGSLANYLFDDFKTTLENLAQSLPKTPKIQIKNSYLLQIQKNK

SEQ ID NO: 95 - DNA, 686 bp, Helicobacter pylori
  CDS (47)...(628)
caaagcctatgcgagagtcaattccgttgcattttcatttagaggcatggaagtccccattgaaggtttagaagaattggtagatgaaacgaaaaaatgcttgatagaagctaagaaaaacaaacaaaaccatttcttgctgattcaaaaagctaacatccaagcaagaaaacaagccatgatagatgaaagtaaaaccattatccatgttgcatcaggagcggctggagcggccgggcttatccccataccctttagcgatgcactcgctatcgcgcccattcaagcaggaatgatctacaaaatgaatgacgcttttggaatggatttggataaatctgtagccgcatcattaatcaccggattgttaggcgtaaccgctgtcgcgcaagtggggagaacgcttgttaatggtttccttaaattcattcctgttgtggggagtgttgcagggggcacaaccgctgtaattatcacagaaggcattgggtttgcgtatttgaaagtgctagaaaagtgctttaatgatgagacgggcgaagtcaatttgcctgatgaagttggcatgataacttctctctttaaggagaattatctcaacttggatacaatcaagaaattaacacaataagattaggggttatgaaaaacgcatggcattagacaaaaggatttggatgcatttt

SEQ ID NO: 96 - protein, 194 aa, Helicobacter pylori
MEVPIEGLEELVDETKKCLIEAKKNKQNHFLLIQKANIQARKQAMIDESKTIIHVASGAAGAAGLIPIPFSDALAIAPIQAGMIYKMNDAFGMDLDKSVAASLITGLLGVTAVAQVGRTLVNGFLKFIPVVGSVAGGTTAVIITEGIGFAYLKVLEKCFNDETGEVNLPDEVGMITSLFKENYLNLDTIKKLTQ

SEQ ID NO: 97 - DNA, 900 bp, Helicobacter pylori
  CDS (6)...(821)
agaagatggggaagtttatgaatactcttaaaaagcatttagcctttatcattcccctagtagcgttattgtttagcttggagtgcgtgttatttatcaatcaagcgatcgaacagaaagaaaaaaaattgattgaagattattcggtcgtgttggccagcacgcaaaaattaaacttggaattgttgcgtcaaaattttagcgaaatcatagcgttaaaagaaattgatcctaattattctttagaacctcttcaaaaaaccttaggcatagatgggcttaaggaattaagaaaaaatttgccctttttttattctttacaactttccacattccccactcaagagcgtttagaaaacattaaagaaaaattgctcaaaatccctggcgttcaaaaagttgaagtctttgccaaaacttacatgcaagtgtatgatctcttgagttttattaaaacagcggtctatatctttgcgttagtggtctttgttttatcggttttattgatgtttaaacaagtccgcatctggatctatcaataccatgagagattagagatcatggatttattaggggcttcggtgtcttttaaaaacgggtttttgtataaaatagctttaatggattctgtaatcgctagttttttagcccccatgctcatgctctataccacttcgcaaaaaggttttgaaaaaacgatggatactttgggtattataggaggcgcgtttgttttaaaccattttttatggggactgctttttagccttgtggtctcatttgtttctgttttacttgtagcttggaggactaggcatgtataaattaggggtgtttttgttagccaccttactatcagctaacacgcaaaaagtgagcgatattgctaaagatatccaa

SEQ ID NO: 98 - protein, 272 aa, Helicobacter pylori
MGKFMNTLKKHLAFIIPLVALLFSLECVLFINQAIEQKEKKLIEDYSVVLASTQKLNLELLRQNFSEIIALKEIDPNYSLEPLQKTLGIDGLKELRKNLPFFYSLQLSTFPTQERLENIKEKLLKIPGVQKVEVFAKTYMQVYDLLSFIKTAVYIFALVVFVLSVLLMFKQVRIWIYQYHERLEIMDLLGASVSFKNGFLYKIALMDSVIASFLAPMLMLYTTSQKGFEKTMDTLGIIGGAFVLNHFLWGLLFSLVVSFVSVLLVAWRTRHV

SEQ ID NO: 99 - DNA, 701 bp, Helicobacter pylori
  CDS (1)...(672)
aggttgtctgaacccatagatagattcacgcgcataaggtggttgtttaaaaacgattttgaaaaaatccgccaacaaagggttttaatctgtggcgtggggggcgttgggggctttgcgctagacgctttgtatcgtgtggggatagggcaaatcactatcattgataaagacgtgtttgatgttaccaatcaaaaccgccagattggctcagaaaggataggagaatctaaagtgttggtgttgcaagatctctataagggcattcaagctttgaacttgcatatagatgaagcgtttttaaattcatttaattttagagattatgattacattttagattgcatggacgatttgcctattaaaacaagcttagcgataaaatgccagaatttcgcttacggaaaatttatcagctctatggggagtgcgaaacgcttgaaccctaaacacatccaagtggggagcgtgtgggaaagctatggcgataaattcgggcgtaaatttagggattttttaaaaaaacgccgttttaaaggggattttaaagtggtttttagccctgaaattccgcattgcatagagcttgggagttttaatgcggttacggcgagttttggtttgcaaatagcgagtgaagtcgtgcaagacattatcaacgataaaaggaagtgagatgaaagattacgaagacgaattgg

SEQ ID NO: 100 - protein, 224 aa, Helicobacter pylori
RLSEPIDRFTRIRWLFKNDFEKIRQQRVLICGVGGVGGFALDALYRVGIGQITIIDKDVFDVTNQNRQIGSERIGESKVLVLQDLYKGIQALNLHIDEAFLNSFNFRDYDYILDCMDDLPIKTSLAIKCQNFAYGKFISSMGSAKRLNPKHIQVGSVWESYGDKFGRKFRDFLKKRRFKGDFKVVFSPEIPHCIELGSFNAVTASFGLQIASEVVQDIINDKRK

SEQ ID NO: 101 - DNA, 1260 bp, Helicobacter pylori
  CDS (73)...(1236)
ctctcggttttttttgtgggtaagatttcgcaccatcacattgtggctttaggggtgggcttgcaatttttgatgcttttttatggcatcaacacgattttatacaccggcactaacgccattctttctaggcttgtgggggctagggattttactcaaatcaaccacgctttttccagtattttcataggggcttttatgatctgtttgggcgtgctgtttgtttcttattttttgattgagccttttttaaattggatgcaattacaagatccttcgcgccaattgacgcaagattatttagaagtcttagttgtagcgctaccgagtatttttttaaaaaatattttagtttcagcgctcgctagtttttcagacaccctaaccccctttattgtcaaaatcatcatggtcattgcatgcatttttttgaatcaagccttgatttttggggattttggttttaaagaaatggggattgtaggctctgctttagcgaatgtggttgtctcttatttggaattactcgcacttggcgtttggatacaaatcaaaaaaatccctttaaaattcaaaataacctttcatttttcttttttaaaaaccatgtttagagtgggttggccagccgggtttgagcgcttattgagtttattttctttaatcctcttatccaaatttgtagcgagctatggggataaagtgttagcgggcatgcaaataggcattagggttgaaaccttttcgttcatgcccggatttgggtttatgatcgcagcgatggttttaacagggcaaaatttaggggcaaacaagccaaagatcgccacagaatacgcgcatttgattttaaaaatctctatgggtttaatgggggttttagggattgttttagtcttattcgctaaagaatttgcgagccttttttctcaagatgaagaagtcttggaagtggcgcgatcttatttgatcgctgtgggcctctctcaagcccccttaattgggtattttgtgctagatggagtttttagaggggctggcatttctaaagtctcactgtatattaacaccctaagcttatgggggttaaggatcatgcccatttacttgcttttaattcatcattttaaggtggaatttatttttgtagtgatcgcatcagaaacttttttgcgctcattcatctattataaagttttttctaaaggcatttggaaaaggtgcgggaaaaaggcttgattattgcttgagcgtagcggt

SEQ ID NO: 102 - protein, 388 aa, Helicobacter pylori
MLFYGINTILYTGTNAILSRLVGARDFTQINHAFSSIFIGAFMICLGVLFVSYFLIEPFLNWMQLQDPSRQLTQDYLEVLVVALPSIFLKNILVSALASFSDTLTPFIVKIIMVIACIFLNQALIFGDFGFKEMGIVGSALANVVVSYLELLALGVWIQIKKIPLKFKITFHFSFLKTMFRVGWPAGFERLLSLFSLILLSKFVASYGDKVLAGMQIGIRVETFSFMPGFGFMIAAMVLTGQNLGANKPKIATEYAHLILKISMGLMGVLGIVLVLFAKEFASLFSQDEEVLEVARSYLIAVGLSQAPLIGYFVLDGVFRGAGISKVSLYINTLSLWGLRIMPIYLLLIHHFKVEFIFVVIASETFLRSFIYYKVFSKGIWKRCGKKA

SEQ ID NO: 103 - DNA, 1327 bp, Helicobacter pylori
  CDS (22)...(1305)
  misc_feature 71: n = A,T,C or G
taaacatctaaaggataaaacatgccattgccatttattatagcagctggagtggccttagtggccgcagnatacggagttaaaaaaaaagttgatgcagacattctcagtgaagagaccaatgaatatattaagtatatcaatgaaggcaatgacttgctagaggaagcagaagaagttattaaagctgtggcttctgattgtgagtttgctcttgcgagatttgaagagaaaaggtgctatattagaaatcatgtaatttcagaatttttgcaccattttaatcaattagaaggattcgagcttaccaacaaaaaagatagcatggaaaatatccaactcgatgtatcaaatacactaaaaattattgataaaaatctcaagatgagctcttttgacacccttggtgccgttggaaatgttgtgggaggtttttctatgggatttggtttggctgctggaggtatagttggaagtgtagggcttttagccggacccacactcgctatttttggagctttgagagctgctgaaatggaaaaaaaattagaagatgctaaggcttattgctctcaagttgaagcagccgtcaaaaaagccgatgcgatgattgataatcttcaagccgttaggaaaatggcagatcttttcactaggcagatcacaaaatttgacgcactgtttttctcgcttgctcaagaggcaatcgccacgatgaaaaagcacaactacgatttttcgcattacaatcaaaaagaacaagatcagctagctactgcttcttcaacccttaaaactttgggtgcttttttgaaagtgcctatcatggacaaacaccaaaagctcaatgaagctacacaaagtaagctagagtttatgcaaagggagatgagtagcctagaagctaagcattatgattcagttaaaatcaaatttggattggtacgcagattatttgaattttttagatcgctttggggaaaaaatggaagaatccaaagagcgaaaacaactcctgatcgcttcccttgcacctcttgcgggctttgctgcaagaatatcgccgggattattgagcttattgggtttgatgctggcaatggggtgtgcaaatttttggatttagaaaccaatctgtgcaagatttatgaatcgcgcccgttaatttgcaggattgatgaagcgcacaaaaagctttatccccacatcccgcttaaggagttttatgccaaaaacgcagaggtttgtaacgctttgcaagaagcaaaccatatggataagagctttagggttattcttaagaaataatttagaatttattgtccca

SEQ ID NO: 104 - protein, 428 aa, Helicobacter pylori
  VARIANT 17: Xaa = Any Amino Acid
MPLPFIIAAGVALVAAXYGVKKKVDADILSEETNEYIKYINEGNDLLEEAEEVIKAVASDCEFALARFEEKRCYIRNHVISEFLHHFNQLEGFELTNKKDSMENIQLDVSNTLKIIDKNLKMSSFDTLGAVGNVVGGFSMGFGLAAGGIVGSVGLLAGPTLAIFGALRAAEMEKKLEDAKAYCSQVEAAVKKADAMIDNLQAVRKMADLFTRQITKFDALFFSLAQEAIATMKKHNYDFSHYNQKEQDQLATASSTLKTLGAFLKVPIMDKHQKLNEATQSKLEFMQREMSSLEAKHYDSVKIKFGLVRRLFEFFRSLWGKNGRIQRAKTTPDRFPCTSCGLCCKNIAGIIELIGFDAGNGVCKFLDLETNLCKIYESRPLICRIDEAHKKLYPHIPLKEFYAKNAEVCNALQEANHMDKSFRVILKK

SEQ ID NO: 105 - DNA, 894 bp, Helicobacter pylori
  CDS (30)...(851)
tattaacaccgttaaagagggggtaattcatgttagaaaacatgcaagatatttcattgcaaagctctcatgaagtaggagtggatattacagagagcaaaatgcttacaaaatttgcatcctcgttattaatgaatttatatgaatatattggaaatggcaaggatcccaaagaagcgtccgatcatgccatgagggatgcaaaggatgtggtgcttagttgtggtagagtagcctttcttaaagacatagtttcaaatagtccaaacgaaacaatccaaagttttgatggagacttagaagttgcgatgcatttagaaaaaattggcatagaatgttataagatatttattgactatggttctcaaaagatcgatgataatgagctttcttgtcgtttgttacacactggcacgaaaattttaggcacaaaagctatggcagttgttggtcaaacattcatccccattcctggagttggagcgataattggaaattttgtgggtgcattactgagcaaaactctctgtgaaaatttgcgagatgttttaaaagaggctaaattggcgcgccaaaggcgtatagagattgaaaaagaatgccgtgaaagtattaggctgttagagatctatcgcaatcaatttaaggaagtgtttgagcggtattttcatgggaatgtaaaattctttaatgagaattttaataatcttgagagggcgctttatgcaggagatgcggatttggccataggagtcaataatgagattcaagaaagactaggtcaaaaacccttgtttaataatacccaagaatttttggaactcatgaataatggtggaaaaatagaaatttaaaggagaaatcatggaagaacaaaaggatatgggtcaaagt

SEQ ID NO: 106 - protein, 274 aa, Helicobacter pylori
MLENMQDISLQSSHEVGVDITESKMLTKFASSLLMNLYEYIGNGKDPKEASDHAMRDAKDVVLSCGRVAFLKDIVSNSPNETIQSFDGDLEVAMHLEKIGIECYKIFIDYGSQKIDDNELSCRLLHTGTKILGTKAMAVVGQTFIPIPGVGAIIGNFVGALLSKTLCENLRDVLKEAKLARQRRIEIEKECRESIRLLEIYRNQFKEVFERYFHGNVKFFNENFNNLERALYAGDADLAIGVNNEIQERLGQKPLFNNTQEFLELMNNGGKIEI

SEQ ID NO: 107 - DNA, 1338 bp, Helicobacter pylori
  CDS (70)...(1281)
cttcattacgcttacgctacaacccttaagatcaccaatgttgtgccttttggctctagcagcgttaaaatggtgttcaatcaagaggttaaaaaattcaaagaagtttcgctcaaaaatttcaagagttatttggaattagaagccattttaaccattcctaaaaagcattaccaattctccaagcaatcgttcatcacgatcgcgcaattcagccctaagttagtgcgagtggttatcggctatgctcctaagatgacttatgaagttaaaatccttaaagacaagctttatgtttctatcgtggagaaaaagcccttaattaggcatcaaatggcgttaaaaccacccaaacaccatgcactcaaacacacaacgccaaaacccgcccataagcccattaaaaaagaggctaaaaaggttaaagaaaaaacgccaactaaacatgcgcattcaaaacacacgcattccccattgaacgaaaggagcactaaaaaagaaattcctaaaaaagaaattcctaaaaaagaagcggaaaatgagagcaagaaccaagtctttatagcagaaaaaaatgatactttcatcaaaaccaaacgcaaaaaacacaaaaagatcgttttagacgctgggcatggggggaaagattgcggggcgatgagcgcgaatttggtgtgtgaaaaagacattgttttagaagtggtgaagtttttacacaaagagcttaaaaaaagagattatagcgttttattgacaagggataaggatatttatattgatttagtggctcgcacggaattagccaataaaaaaagcgcggatttattcatctcagtgcatgccaattccatccccaaacattccacttctaacgctcatggtatagagacttattttttatccaccgcaaggagcgaaagggctaggaaagtggctgagcaagaaaataaagacgatgtgaatttaatggattatttttctaaaagtttgtttttaaattcattgaacacgcagcgattgatcgtctctaacaaattagcgattgatgtgcaatacggcatgctccaaagcgtccgcaaaaattaccctgatgtggtggatggaggcgtgagagaggggcctttttgggtgttggccggggctttaatgccttcaatcttaatagaaattggttataattcccatgcgatagaatctaaacgcatccaaagcaaaccgtatcaaaagatcttggctaagggcattgctgatggcattgatagtttcttcagcaagaatgattaggcaatgattaggttgtagatgaatttttatcaaaaaatatacactcataaagtc

SEQ ID NO: 108 - protein, 404 aa, Helicobacter pylori
MVFNQEVKKFKEVSLKNFKSYLELEAILTIPKKHYQFSKQSFITIAQFSPKLVRVVIGYAPKMTYEVKILKDKLYVSIVEKKPLIRHQMALKPPKHHALKHTTPKPAHKPIKKEAKKVKEKTPTKHAHSKHTHSPLNERSTKKEIPKKEIPKKEAENESKNQVFIAEKNDTFIKTKRKKHKKIVLDAGHGGKDCGAMSANLVCEKDIVLEVVKFLHKELKKRDYSVLLTRDKDIYIDLVARTELANKKSADLFISVHANSIPKHSTSNAHGIETYFLSTARSERARKVAEQENKDDVNLMDYFSKSLFLNSLNTQRLIVSNKLAIDVQYGMLQSVRKNYPDVVDGGVREGPFWVLAGALMPSILIEIGYNSHAIESKRIQSKPYQKILAKGIADGIDSFFSKND

SEQ ID NO: 109 - DNA, 1161 bp, Helicobacter pylori
  CDS (37)...(1125)
tgaaattaaatattaactaatattaaggaaagagctatggtatcaacactcaaaccgctaaaaatcggtaagcacaccataaaattccctatctttcaagggggaatgggtgtggggattagctgggatgaactagctggaaatgttgccaaagaaggggctttaggagtgatttcagccgtagggactggttattataaaaacatgcgttttgtagaaaggattgtggctaaaaaaccctttgaagccttgaatttttactccaaaaaagcgttgaatgagatttttgcaaacgctaggaagatttgcgggaacaaccctttaggagcgaatattttatacgctatcaatgactatggccgtgttttaagggactcttgtgaagcgggagcgaatatcattattacaggggctggtttgcccaccaacatgcctgaattcgctaaggattttagcgatgtggcgctcatccctattatttcttcagcgaaggctttaaaaatcctttgtaaaagatggagcgatcgctataaaagaatcccggacgcgttcattgtggaagggcctttgagtggggggcatcagggctttaaatacgaagattgtttcaaagaagaattccgattagaaaacttagtgcctaaagtcgtggaagcttctaaagaatgggggaatatccctatcatcgccgctggggggatttgggataggaaggatatagacaccatgttaagtcttggagcgagtggggtgcagatggcgactcgttttttaggcacgaaagaatgcgacgctaaagtgtatgccgatcttttgcccacgctcaaaaaagaagatattttactcattaaatcgcctgtaggttatccggctagggctattaatacgggagtgatcaagcgcattgaagagggtaacgcgcccaaaatcgcatgcgtgagcaattgtgtagcgccttgcaacaggggtgaagaggctaaaaaggtgggctattgtatcgctgatggtttggggcgcagttatttagggaacagagaagaggggctttattttaccggggctaatggctatagagtggataagattatcagcgtgcatgaattgattaaagagcttacagagggttaatttgtagtgcttgtgaggttaggggttgttgca

SEQ ID NO: 110 - protein, 363 aa, Helicobacter pylori
MVSTLKPLKIGKHTIKFPIFQGGMGVGISWDELAGNVAKEGALGVISAVGTGYYKNMRFVERIVAKKPFEALNFYSKKALNEIFANARKICGNNPLGANILYAINDYGRVLRDSCEAGANIIITGAGLPTNMPEFAKDFSDVALIPIISSAKALKILCKRWSDRYKRIPDAFIVEGPLSGGHQGFKYEDCFKEEFRLENLVPKVVEASKEWGNIPIIAAGGIWDRKDIDTMLSLGASGVQMATRFLGTKECDAKVYADLLPTLKKEDILLIKSPVGYPARAINTGVIKRIEEGNAPKIACVSNCVAPCNRGEEAKKVGYCIADGLGRSYLGNREEGLYFTGANGYRVDKIISVHELIKELTEG

SEQ ID NO: 111 - DNA, 2373 bp, Helicobacter pylori
  CDS (13)...(2337)
tagacaggatagatgaacgaaattgataaatccgttgatatcggattcttacggattcttgatgttattaaaaaagttacgaccccaaagggtggcattgaaatcttaaggactttaattgattttacgcccaaaattgaaaacgccctgaatttagcggccaaaagccataaggggcaatacagaaaaagcggcgagccttatattgtccatcctatttgcgtggcaagcttggtagcgttttgtgggggcgatgaggcgatggtgtgtgctgcgcttttgcatgatgtggtggaagacacgccttgtaagattgaaacgattgagcaagaatttgggcaagatgtggctaatttagtggatgcgctcactaaaatcactgaaatcaggaaagaagaattaggcgtgagctctcaagatcccagaatggtggtttcagcgctcactttcagaaagattttaattagcgcgatacaagatccaagagccttagtggtaaagattagcgacaggttgcacaacatgctcaccttagacgccttgcctcatgacaagcaagtgcgtatttctaaagagactctagcggtgtatgcccctatagcgagccgattgggcatgtcttcaatcaaaaatgaattagaagacaagagcttttattatatttatccagaagagtataaaaatatcaaggaatatttgcacaaaaacaagcagtctttactcttaaagctcaacgcttttgcgagcaagttagaaaaaaaactttttgatagtgggtttagccattcggattttaaactcgttacaagggtgaaacgcccttattctatctatcttaagatgcaacgaaagggcgcggttaatattgatgaaattttggacttgttagccattaggattttattgaaaaacccgattgattgctataaagttttagggattatccatttgaatttcaaacccattgtctctcgttttaaagattacatcgctttgcccaaagaaaatggctataagacgatacacacgaccatttttgatgaatcttctgtttatgaagtgcagatccgcacctttgatatgcatatgggggcggagtatggtaattcagcccactggaagtataaagccgggggcgtggatcatgaagatcatcatgagggcatgagatggttgcaaaattttaaataccatgacagcgatttgaaaaacgaccctaaggaattttacgaactcgctaagaacgatttgtatcgtgaagatattgtcgttttttcgcctcatggggacacttacactttaccggtgggtgcgatcgctttagattttgcttacatggtgcatagcgatttgggcgataaagccacggacgcttatatcaatagtaaaaaagccttactcaatcaggaattaagaagtggggatgtggttaaaatcattaaaggcgataaaataatacctcgtttcatttggatggatcagcttaaaacttctaaggctaaaaaccatttgcgcatccaaagaagaaaccgcttgaaagaggttgacactaagagcatgatcaatatcttagcgactttttttgggcgctctgtttttgaagacatggatttaaaggattataaaaactttgaagaaagattaacagattgcggggtggagaccaccttaacagaagcgatgaaaagttttgaaaatttagccaaactcactgaagaaattgaaaataaggtgttttctttaaaagaagatgcgattttagaataccaagagatgagtttatggactcgaggtttaaggtatttgggctttaaaaccaatgtcttgaattttttagcccccaatcggcagtggcagtgtaaggaattagaacattttagcgtttgttcaagcaacgctttagaaatcaaacaggtgttgttgaatgattgttgttaccctaaatatggcgatgaaatcattgcgattgtaacggatttaaaagatccaaaagcgattgcgcaccataaattttgcaaaaaagcgatggcggaagtagatgctaaagtgcctatggtttatatagaatggcacaagcgggatcgaacgatttataaaatgatgttttatttgggcgaaaaaaagtcggttttagcgggtttattaacttttttaaacaggaatgaatgcaacattgtgggcgtgtcttatttgggctataaagacaagtattctagccattgtgaagtgagttttgaaatagccacagataaggcggattggatcagagccttaatcaatcgcaaatatcaggataggattgtagaattatccagtctggatgacgcttatgaatcataataagccctaattaaggaatgaacatggaacaaa

SEQ ID NO: 112 - protein, 775 aa, Helicobacter pylori
MNEIDKSVDIGFLRILDVIKKVTTPKGGIEILRTLIDFTPKIENALNLAAKSHKGQYRKSGEPYIVHPICVASLVAFCGGDEAMVCAALLHDVVEDTPCKIETIEQEFGQDVANLVDALTKITEIRKEELGVSSQDPRMVVSALTFRKILISAIQDPRALVVKISDRLHNMLTLDALPHDKQVRISKETLAVYAPIASRLGMSSIKNELEDKSFYYIYPEEYKNIKEYLHKNKQSLLLKLNAFASKLEKKLFDSGFSHSDFKLVTRVKRPYSIYLKMQRKGAVNIDEILDLLAIRILLKNPIDCYKVLGIIHLNFKPIVSRFKDYIALPKENGYKTIHTTIFDESSVYEVQIRTFDMHMGAEYGNSAHWKYKAGGVDHEDHHEGMRWLQNFKYHDSDLKNDPKEFYELAKNDLYREDIVVFSPHGDTYTLPVGAIALDFAYMVHSDLGDKATDAYINSKKALLNQELRSGDVVKIIKGDKIIPRFIWMDQLKTSKAKNHLRIQRRNRLKEVDTKSMINILATFFGRSVFEDMDLKDYKNFEERLTDCGVETTLTEAMKSFENLAKLTEEIENKVFSLKEDAILEYQEMSLWTRGLRYLGFKTNVLNFLAPNRQWQCKELEHFSVCSSNALEIKQVLLNDCCYPKYGDEIIAIVTDLKDPKAIAHHKFCKKAMAEVDAKVPMVYIEWHKRDRTIYKMMFYLGEKKSVLAGLLTFLNRNECNIVGVSYLGYKDKYSSHCEVSFEIATDKADWIRALINRKYQDRIVELSSLDDAYES

SEQ ID NO: 113 - DNA, 310 bp, Helicobacter pylori
  CDS (10)...(279)
aaaaggagagtggcggtgaaaaaaatcgttgtgagttggtgtgtggcgttggcttttttaagcgcggattcagcacaagccaataaagcgatcagtaatgcggatttgattaaagagataagggatttaaaaaaaatcatcagcgcgcaaaacactgagattaacaacttaagaaaagtgcaagaagtgttgtctgggcaattaggggacatgcgtaaggatatattaagcactagagattattgcattagcttaaggccttatatctataattggcgctaggggataatccaaaaaatgaaagcatgcg

SEQ ID NO: 114 - protein, 90 aa, Helicobacter pylori
VAVKKIVVSWCVALAFLSADSAQANKAISNADLIKEIRDLKKIISAQNTEINNLRKVQEVLSGQLGDMRKDILSTRDYCISLRPYIYNWR

SEQ ID NO: 115 - DNA, 1631 bp, Helicobacter pylori
  CDS (52)...(1569)
tgaaaaagaactcaaagagctgcaaaaaaaacaaaaacacgagtaacaaccatgattaacacgatgttttgcgcgaccatgcaaaggggagtggcggaaatcgtggctgtggaagcgactttcacaagggctttgccggcgtttgtgatttcagggttagctaatagctctatccaagaagccaaacagcgggttcaatcggctttacaaaataacgatttcactttcccgcctttaaaaatcaccatcaacctttccccctcagatttgcctaaatccgggagtcattttgatttgcctatcgctcttttaatcgctttgcaaaaacaagagttggcttttaaagagtggtttgcttttggggagttagggcttgatggcaagatcaaacccaatcctaacattttccccatgcttttagacattgccattaaacacccccatgctaagatcattgcgcctaaggccaatgaagagcttttttcgcttatccctaatttgcaatgcttttttgtggggcattttaaagaagcgttagaaatcttgcaaaaccctgaaaccaaagcagacacccacacgaaaaaactaccctttaaaacgatagaattgaacgataaagagtattatttttcagacgcctatgccttagattttaaagaagttaaggggcaagctgtcgctaaagaggccgctttgatcgctagcgctgggtttcataacttgattttagagggaagtccagggtgtgggaaaagcatgatcattaatcgcatgcgttatatcttgcctccattaagcctgaatgaaatcctagaagcgacaaaattacgcattttaagcgagcaagacagtgcctattaccccttaaggagttttagaaaccctcaccaaagcgcttcaaaatccagtattttaggctcaagctctctaagagagccaaaacctggcgaaatcgcgctagcgcataacggcatgcttttttttgatgaattgcctcattttaaaaaggatattttggaagctttaagagagcctttagaaaacaataaattggtggtttcaagagtgcatagcaaaattgaatacgaaacctcttttttatttgtaggggctcaaaacccttgcttgtgcgggaatttactcagcgcgaccaaagcatgccgttgccaagacagagaaatcacgcagtataaaaaccgcttgagcgagccttttttggataggattgatttgtttgtgcaaatggaagaggggaattataaagacacgccgtcgcattcttggacttcaaaagagatgcatgaattggtgttattagctttcaagcagcaaaagttaaggaaacagagcgtttttaatggtaagcttaatgaagagcagatagaacgattttgccccttaaacgctgaagcaaaaaagttgttggagcaggcggttgaaaggtttaatctctccatgcgctctattaataaggtcaaaaaagtcgctaggacgattgcggatttaaacgcttgcgaggatatagaaaaatctcacatgcttaaagcgctgagttttagaaagatttcttaaaaggatttttataagggagaaaaaatgcaagaataccacattcataatttggattgccc

SEQ ID NO: 116 - protein, 506 aa, Helicobacter pylori
MINTMFCATMQRGVAEIVAVEATFTRALPAFVISGLANSSIQEAKQRVQSALQNNDFTFPPLKITINLSPSDLPKSGSHFDLPIALLIALQKQELAFKEWFAFGELGLDGKIKPNPNIFPMLLDIAIKHPHAKIIAPKANEELFSLIPNLQCFFVGHFKEALEILQNPETKADTHTKKLPFKTIELNDKEYYFSDAYALDFKEVKGQAVAKEAALIASAGFHNLILEGSPGCGKSMIINRMRYILPPLSLNEILEATKLRILSEQDSAYYPLRSFRNPHQSASKSSILGSSSLREPKPGEIALAHNGMLFFDELPHFKKDILEALREPLENNKLVVSRVHSKIEYETSFLFVGAQNPCLCGNLLSATKACRCQDREITQYKNRLSEPFLDRIDLFVQMEEGNYKDTPSHSWTSKEMHELVLLAFKQQKLRKQSVFNGKLNEEQIERFCPLNAEAKKLLEQAVERFNLSMRSINKVKKVARTIADLNACEDIEKSHMLKALSFRKIS

SEQ ID NO: 117 - DNA, 605 bp, Helicobacter pylori
  CDS (26)...(547)
ttacagaaaaacgtgaagtgattgcatggcgttattagagattatccattacccttctaaaatcttaagaacgatttctaaagaggtcgtttcttttgattcaaaactccaccaacagctagatgacatgcatgagactatgatcgctagtgaggggatagggttagccgctattcaagtgggtttgcctttaagaatgctcatcatcaacctcccgcaagaagacggcgtgcaacacaaagaagactgcttggaaatcattaaccctaagtttatagaaactgggggatcaatgatgtatagagaagggtgcttgtctgtgccgggattttacgaagaagtggagcgttttgaaaaggttaagatagagtatcaaaaccgcttcgctgaagtgaaagttttagaagcgagcgagcttttagcggtagccattcagcatgagatcgatcacctcaatggcgtgttattcgtggataaattatccattttgaagcgtaagaaatttgaaaaagaactcaaagagctgcaaaaaaaacaaaaacacgagtaacaaccatgattaacacgatgttttgcgcgaccatgcaaaggggagtggcggaaat

SEQ ID NO: 118 - protein, 174 aa, Helicobacter pylori
MALLEIIHYPSKILRTISKEVVSFDSKLHQQLDDMHETMIASEGIGLAAIQVGLPLRMLIINLPQEDGVQHKEDCLEIINPKFIETGGSMMYREGCLSVPGFYEEVERFEKVKIEYQNRFAEVKVLEASELLAVAIQHEIDHLNGVLFVDKLSILKRKKFEKELKELQKKQKHE

SEQ ID NO: 119 - DNA, 564 bp, Helicobacter pylori
  CDS (22)...(495)
ccccaaacaataggataaaaaatgccgctcactcatttgaatgaagaaaatcagcctaaaatggtggatataggggataaagaaaccactgaaagaatcgctttagcaagcggtcgtatcagcatgaataaagaggcttatgacgctattatcaatcattgcgtcaaaaagggtccggtgttacagactgctattattgctggaattatgggggctaaaaagacaagcgagctcattcccatgtgccatccaatcatgctcaatggggtggatattgatattttagaagaaaaagagacttgtagttttaaactctatgcgagagtcaaaactcaagctaaaacgggcgtagaaatggaagcgctaatgagtgtgagcatagggcttttaaccatttatgacatggtgaaagccattgacaagagcatgacaattagcggtgtgatgttggagcataaaagtggaggcaaaagtggggattataacgctaaaaaatagaaaaagaccaataatctaaagatgttagggtaaaataacattttgacaacaaaagcgtgttggttg

SEQ ID NO: 120 - protein, 158 aa, Helicobacter pylori
MPLTHLNEENQPKMVDIGDKETTERIALASGRISMNKEAYDAIINHCVKKGPVLQTAIIAGIMGAKKTSELIPMCHPIMLNGVDIDILEEKETCSFKLYARVKTQAKTGVEMEALMSVSIGLLTIYDMVKAIDKSMTISGVMLEHKSGGKSGDYNAKK

SEQ ID NO: 121 - DNA, 605 bp, Helicobacter pylori
  CDS (25)...(552)
cttttagcttaaaaaggagttcaaatgcaaacgattcatataggcgttttgagcgcgagcgatagagcgtcaaaagggatttatgaagatttaagcggtaaggcgatacaagaagtgttgagcgaatacttgctcaatcctttagaattttattacgaaattgtcgctgatgaaagggatttaattgaaaaatcactgattaaaatgtgcgatgaataccaatgcgatctagtcgttactacaggaggcacaggccctgctttaagagatataaccccagaagccacagaaaaagtgtgccaaaaaatgcttcctggttttggagagcttatgcgaatgactagtttaaaatatgtgcctacagcgatcctgtcgcgccagagcgctggtattaggaataagagtttgattattaatctccctggtaagccaaaaagtattagagaatgcttagaggcggtttttccagcgattccttattgcgtggatttgattttagggaattatatgcaagtgaatgaaaaaaacattcaagcgtttcgccccaaacaataggataaaaaatgccgctcactcatttgaatgaagaaaatcagcctaaaatg

SEQ ID NO: 122 - protein, 176 aa, Helicobacter pylori
MQTIHIGVLSASDRASKGIYEDLSGKAIQEVLSEYLLNPLEFYYEIVADERDLIEKSLIKMCDEYQCDLVVTTGGTGPALRDITPEATEKVCQKMLPGFGELMRMTSLKYVPTAILSRQSAGIRNKSLIINLPGKPKSIRECLEAVFPAIPYCVDLILGNYMQVNEKNIQAFRPKQ

SEQ ID NO: 123 - DNA, 659 bp, Helicobacter pylori
  CDS (31)...(630)
gcaattactagaagaatacacccacaaattatgccaaatcatcagccagtaaaaaaatttaagattattgggggggcttgtaagggattaggcttgaatttgcctaacatttctagcacgcgccccaccaaagcgatcgtaagagagtcgttttttaacaccttgcaagcagaaattaatggagcgcattttatagaagtgttttcaggcagcgcttctatgggtttagaggctttgagtaggggggctaaaagtgcggtgttttttgaacaaaacaaaagcgcttataagacgcttttagaaaatatttccctttttaaaaaccgcttgaaaaaagaaatggaaattcaaacctttttagatgacgctttcaagcttttgcccacgctgtgtttaaaaaatggcgttttgaatattatttatttggatcctccttttgaaacaagtgggtttttagggatttatgaaaagtgttttcaagctttagaaaggttattgaaacgctttaatccaaaaaatcttttagtggtttttgagcatgaaagcatgcatgaaatgcctaaaagtcttgtaactttagctataatcaaacaaaaaaaatttggaaaaaccactttaacttattttcaataggaataggcatggcagaagaacaagaa

SEQ ID NO: 124 - protein, 200 aa, Helicobacter pylori
MPNHQPVKKFKIIGGACKGLGLNLPNISSTRPTKAIVRESFFNTLQAEINGAHFIEVFSGSASMGLEALSRGAKSAVFFEQNKSAYKTLLENISLFKNRLKKEMEIQTFLDDAFKLLPTLCLKNGVLNIIYLDPPFETSGFLGIYEKCFQALERLLKRFNPKNLLVVFEHESMHEMPKSLVTLAIIKQKKFGKTTLTYFQ

SEQ ID NO: 125 - DNA, 695 bp, Helicobacter pylori
  CDS (26)...(655)
cgtgcctacttcgctttttgccgccatgacaggcacacatgcgcgttacgtgaaagccgcttacaaagagataaaaattgtttttttaaaccctaaaatcaatttaaacgaaaccatcaaaaatttagtggaattagccactctggctagaaaagatggggtgttgagtttagaggggcgagtggcgcaaattgaagacgatttcacccgtaatggcttgtctatgatcatagatggcaaggatttaaaatccgttaaggaaagcttagaaatcagcattgaagaaatggaagagtattaccacggcgccgctcattattgggagacggccggtgagaccgctcctactatggggttagtgggggcggttatggggcttatgttagccttgcaaaaactagacaacccggctgaaatggcagcagggatcgctggggcttttacggctactgttacagggattatgtgttcttatgcgatttttggcccttttgggcataagctcaaagctaagtctaaagacattatcaaagaaaaaaccgttcttttagaggggattttaggcatcgctaatggggaaaacccaagggatttagaaaacaaactcttaaactacatcgctcccggtgaacctaaaaaatctcaatttgagggctaaagatggctaagaaaaacamacccaccgaatgccccgc

SEQ ID NO: 126 - protein, 210 aa, Helicobacter pylori
MTGTHARYVKAAYKEIKIVFLNPKINLNETIKNLVELATLARKDGVLSLEGRVAQIEDDFTRNGLSMIIDGKDLKSVKESLEISIEEMEEYYHGAAHYWETAGETAPTMGLVGAVMGLMLALQKLDNPAEMAAGIAGAFTATVTGIMCSYAIFGPFGHKLKAKSKDIIKEKTVLLEGILGIANGENPRDLENKLLNYIAPGEPKKSQFEG

SEQ ID NO: 127 - DNA, 810 bp, Helicobacter pylori
  CDS (13)...(783)
tgagggctaaagatggctaagaaaaacamacccaccgaatgccccgccggtgaaaaatgggcggttccttatgcggactttttgtcgttgttgctcgcgctttttatcgctctttatgccatttcagcggtcaacaaatccaaagtggaagccttaaaaaccgaatttattaagatttttaattacgctcccaagccagaggcgatgcagccggttgtagtgatcccgcctgattcagggaaagaagaagaacaaatggcgagcgaaagctccaaaccggcttcgcaaaataccgaaacaaaagccactatcgctcgcaaaggcgaaggcagtgttttagagcaaattgatcaaggctctatcttaaagctcccctctaatttgctgtttgaaaacgctacttcagacgctatcaatcaagacatgatgctttatattgaacggatcgctaaaatcattcaaaaactccctaaaagggtgcatattaatgtgagaggctttacggatgatacgcctttagttaaaacccgttttaaaagccattatgaattagccgccaatcgcgcttatagggtgatgaaagtccttatacaatacggcgtaaatcctaaccaattgtctttttcttcttacggctctaccaaccctatcgcgcctaacgactccctagagaacagaatgaaaaacaatcgtgtggaaatctttttttcaaccgatgcgaacgatttgagtaaaattcattctattttagataatgagttcaatccccacaaacagcaagaatgaatcgcatgaataaaaattatcttt

SEQ ID NO: 128 - protein, 257 aa, Helicobacter pylori
  VARIANT 6: Xaa = Any Amino Acid
MAKKNXPTECPAGEKWAVPYADFLSLLLALFIALYAISAVNKSKVEALKTEFIKIFNYAPKPEAMQPVVVIPPDSGKEEEQMASESSKPASQNTETKATIARKGEGSVLEQIDQGSILKLPSNLLFENATSDAINQDMMLYIERIAKIIQKLPKRVHINVRGFTDDTPLVKTRFKSHYELAANRAYRVMKVLIQYGVNPNQLSFSSYGSTNPIAPNDSLENRMKNNRVEIFFSTDANDLSKIHSILDNEFNPHKQQE

SEQ ID NO: 129 - DNA, 549 bp, Helicobacter pylori
  CDS (16)...(474)
tgttaagatcagtttatggaacaaaatattttctccttactcattcaaaaaaagtcttataaaaagcttgaaacccttttgaaactcaaaaagcttaaggtttttatgcctttaagtttacaagaaaatttgctttttatcttcataaaagactctaaattgctttttgcgtttaaagacatttgggcttctaaagaatttaaccaacgattcgctaaagaaatcagccattttttaaacacgcaagggcatgcttatgggtttgacgggttgaatgggttagaaattttaggttatgtgcctaaagacgcgctaaaaaaatccaatttttatgcccccattaaaaaacaagcccgtttttttcgccctagtgctttagggttgttccataaccccattaaagacgctcgtttgcatgaatgttttgaaaaagcgcgcgctttgatccactaccaacgaagtttttttgaggaatgaatggctgatttattgtccagtttaaaaaaccttcctaacagcagtggcgtgtatcaatattttgataaaaac

SEQ ID NO: 130 - protein, 153 aa, Helicobacter pylori
MEQNIFSLLIQKKSYKKLETLLKLKKLKVFMPLSLQENLLFIFIKDSKLLFAFKDIWASKEFNQRFAKEISHFLNTQGHAYGFDGLNGLEILGYVPKDALKKSNFYAPIKKQARFFRPSALGLFHNPIKDARLHECFEKARALIHYQRSFFEE

SEQ ID NO: 131 - DNA, 352 bp, Helicobacter pylori
  CDS (1)...(318)
aagtgttacttttttataactttttcatattcttatgggtatgttgtcatttttttaccggagaattttatcttgagaaacatttatgtagggaatttggtttatagcgctaccagtgagcaagtcaaggagcttttcagtcaatttggcaaagtttttaatgtcaagctgatttatgacagagaaacgaagaaacctaaaggttttggctttgtagaaatgcaagaagagagcgttagtgaagcgatcgctaaattagacaatacggattttatgggcagaacgattagggtaaccgaagctaatcctaaaaagtcttagtaacattagaaaataattttctaatgcgctt

SEQ ID NO: 132 - protein, 106 aa, Helicobacter pylori
KCYFFITFSYSYGYVVIFLPENFILRNIYVGNLVYSATSEQVKELFSQFGKVFNVKLIYDRETKKPKGFGFVEMQEESVSEAIAKLDNTDFMGRTIRVTEANPKKS

SEQ ID NO: 133 - DNA, 1558 bp, Helicobacter pylori
  CDS (31)...(1473)
ttagatttaaaattagattaaggatagaaaatgagaattttacaaagggctttgacttttgaagatgtgttgatggtgcctagaaagtctagcgttttacctaaagatgtgagcttaaagtctcgcttaactaaaaacattcgtttgaatatcccctttatcagtgcggctatggatacggttacagagcataaaaccgctatcgctatggcgcgccttgggggtattggcatcgtgcataaaaacatggatattcaaacgcaagttaaagaaatcactaaggttaaaaaaagcgagagcggggtgattaatgatcctatttttatccatgcgcacaggacgctagcggacgctaaagtcataacggataattacaagatttcaggcgtgcctgtggtagatgataaggggttgttgattgggattttaaccaacagagatgtgcgctttgaaaccgatttgagtaaaaaagtgggcgatgtgatgactaaaatgcctttagttaccgctcatgtgggtatcagtttggatgaagcgagcgatttgatgcacaagcataagattgaaaaattgcccattgtggataaagataatgtcttaaaaggcttgatcacgatcaaagatattcaaaaacgcattgaataccctgaggccaataaagatgattttgggaggttgagagtgggggcggctattggagtggggcagttggatagggctgagatgttagttaaagcgggggtggatgcactggtgctagacagcgcacatgggcattcagccaatatcttacacactttagaagagattaaaaaaagcttggtagtggatgtgattgtggggaatgtggttactaaagaagccacaagcgatttgattagcgcgggagcagacgctattaaagtgggtattgggccaggaagcatttgcaccactaggattgtggctggggtgggaatgccccaagtgagcgcgattgataattgcgtagaagtggcgtctaaatttgatattcctgtgattgcagatggagggatccgctattcaggcgatgtggctaaggctttggctttgggggcatcaagcgtgatgataggctctttactcgctggcacagaagaatctcctggggattttatgatctatcaagggaggcaatataaaagctataggggcatgggcagcattggggctatgactaaagggagctctgataggtattttcaagagggcgtagcgagtgaaaagttagtcccagaaggcattgaagggcgtgtgccttatcgtggtaaggtttcggatatgattttccaattagtagggggcgtgcgctcttctatggggtatcagggggcgaaaaatattttggaattgtatcaaaacgctgaatttgtagaaatcactagcgcggggttaaaagaaagccatgtgcatggcgtggatattactaaagaagcccctaattattatgggtgaattgtaaaagaaaacaagacaaatcgttaaaaaactcgttaaaaagcttggtttaatgagtttttaaaacttaattgctaca

SEQ ID NO: 134 - protein, 481 aa, Helicobacter pylori
MRILQRALTFEDVLMVPRKSSVLPKDVSLKSRLTKNIRLNIPFISAAMDTVTEHKTAIAMARLGGIGIVHKNMDIQTQVKEITKVKKSESGVINDPIFIHAHRTLADAKVITDNYKISGVPVVDDKGLLIGILTNRDVRFETDLSKKVGDVMTKMPLVTAHVGISLDEASDLMHKHKIEKLPIVDKDNVLKGLITIKDIQKRIEYPEANKDDFGRLRVGAAIGVGQLDRAEMLVKAGVDALVLDSAHGHSANILHTLEEIKKSLVVDVIVGNVVTKEATSDLISAGADAIKVGIGPGSICTTRIVAGVGMPQVSAIDNCVEVASKFDIPVIADGGIRYSGDVAKALALGASSVMIGSLLAGTEESPGDFMIYQGRQYKSYRGMGSIGAMTKGSSDRYFQEGVASEKLVPEGIEGRVPYRGKVSDMIFQLVGGVRSSMGYQGAKNILELYQNAEFVEITSAGLKESHVHGVDITKEAPNYYG

SEQ ID NO: 135 - DNA, 919 bp, Helicobacter pylori
  CDS (58)...(876)
taatgaaaaatagttcatgaacgcttttgcattaaggctcaaaaaaagcgccgtttaatggatttttgtaaaataaaagaaattttaaggaggcttgtggtgttgaaagaattacgccaaaaacgccctttagtgcataatatcaccaattatgtggcggcgcaatttgtggctaatggtttgttagctttaggggcatcgcctttaatgagcgatgcgattgatgaaatgcgagatttagcgaaaatttctgacgcgctcgctatcaatattggcacccttaatgatcgcgctattttatgcgctaaagaggctatcaagcattacaaggctttgaacaaacccattgtgttagatcctgtggggtgttcagcgagcgctttgcgtcatgacaccagtttagagcttttgaaaagtggtgggattagcgcgcttaggggtaatgctgcagaattaggctctttagtggggatttcttgcgaaagtaaggggctagactctaatgatgccgccacgcctgtagaaataatcaaattagcggctcaaaaatattctgtgatagcggtaatgacgggtaaaacagattacgtgagcgatgggaaaaaggttttgagtattactggggggagcgagtatttagcgctcattactggggctgggtgtttgcatgccgcagcatgcgcgagctttttaagtttgaaaaaagaccccttagattctatggcgcaactttgcgcgctctataaacaagccgcttttaacgcgcaaaaaaaggtgttggaaaataacggctctaatggttcgttcttgttttattttttagatgctctaagcttgcccatagagttagaaaacagccttattaaggaagagtggtgaaaatttacccgcaagttttaagcattgctggcagcgatag

SEQ ID NO: 136 - protein, 273 aa, Helicobacter pylori
MDFCKIKEILRRLVVLKELRQKRPLVHNITNYVAAQFVANGLLALGASPLMSDAIDEMRDLAKISDALAINIGTLNDRAILCAKEAIKHYKALNKPIVLDPVGCSASALRHDTSLELLKSGGISALRGNAAELGSLVGISCESKGLDSNDAATPVEIIKLAAQKYSVIAVMTGKTDYVSDGKKVLSITGGSEYLALITGAGCLHAAACASFLSLKKDPLDSMAQLCALYKQAAFNAQKKVLENNGSNGSFLFYFLDALSLPIELENSLIKEEW

SEQ ID NO: 137 - DNA, 1010 bp, Helicobacter pylori
  CDS (78)...(971)
atccaaataattgggcgattaaagagggaatttattcaatcaaaccaaataaaaaaatagtatttccaagatttttaatgttttgctttgaaaatttgaatattcaaaatgmtataaaaagtaaaagttttggaggaatagttaaaagtatatcaatgaacgatttacaacaaataaccatccccatcccacccctagagatccaacaagagatcgttaagattttggacgctttcacagaattaaacacagaattaaacacagaattaaaagcgcgcaaaaagcaatatgagtattaccaaaacatgcttttagactttaacgatattaatcaaaaccacaaagacgccaaaataaaaacctaccctaaacgcttgaaaaccttactccacactttagcgcctaagggggtggagtttaggaaattgggggaggtgtgtgaaagcacaaataaaaaaacactcaaaataagcgaagtaagtgaagtaaaaaataagggaatgtatccagtgataaattcagggagggatttgtatggttattaccatgattttaacaatgatggagaaaatataactattgcatctaggggagaatatgcaggatttataaactatttcaatgaaaaattttttgcagggggtctatgttatccctataaagttaaagacactaacgagcttttaacaaaatttttatacttttatctcaaaactaatgaaatccaaattatggagaaccttgtttttcgtggcagtatccccgcactcaataaagcagatattgaaactttaacaatccccatcccacctctagagatccaacaagagatcgttaagattttggatcaattttcagccctaaccaccgatttattagccggtatccccgctgaaataaaagcccgaaaaaagcaatacgaatattaccgagaaaaactactgaccttcaaacctctccaaaacaaggaataacatgagttacgaaacgatcgcagaaagcaatgaaag

SEQ ID NO: 138 - protein, 298 aa, Helicobacter pylori
  VARIANT 12: Xaa = Any Amino Acid
MFCFENLNIQNXIKSKSFGGIVKSISMNDLQQITIPIPPLEIQQEIVKILDAFTELNTELNTELKARKKQYEYYQNMLLDFNDINQNHKDAKIKTYPKRLKTLLHTLAPKGVEFRKLGEVCESTNKKTLKISEVSEVKNKGMYPVINSGRDLYGYYHDFNNDGENITIASRGEYAGFINYFNEKFFAGGLCYPYKVKDTNELLTKFLYFYLKTNEIQIMENLVFRGSIPALNKADIETLTIPIPPLEIQQEIVKILDQFSALTTDLLAGIPAEIKARKKQYEYYREKLLTFKPLQNKE

SEQ ID NO: 139 - DNA, 1305 bp, Helicobacter pylori
  CDS (42)...(1253)
  misc_feature 479, 480, 481, 482, 483: n = A,T,C or G
gattaggggagttagaaaccatttgcgtggaagaagatcccatgtatgaatgcgaagtggcgattgaaaaaatcctagaagatttaggcattcctagctctaaacacaacgatttgatgaaaaccctgccaagcagcgataaatttaaaatccttctcgctcaagtcttgttccctaaaccggatattttgcttttagatgagccgaccaacaacctggatttaaacgccattgaatggctagaaaacaacctcaaacgccatgaaggcacgatggtcgtcattagccatgacaggcattttttaaatgcggtatgcacgcatattttggatttggatttccacagcgtgcgcgaatttagcgggaattatgacgattggtatatcgcttccactctgatcgctaaacagcaagaggccgaacgcaataaaaaactcaaagaaaaagaagagctagaaaaattcatcgcgcgctttarnnnnnacgcttctaaagccaagcaagccaccagccgccaaaaacaactggataaattagacattcaaagtttagcggtatctagcaggagggatcctagcattatttttaaacccaaacgcaccattggtaatgaagccttagagtgcgaaaacatctctaaaagttatgacgaccaaatcgttttaaatcaagtgagcttgaaagtgatgcctaaagacaagatcgccctcatagggccaaacggcgtgggtaaatccacgctttgtaaaattctagtagaagaattaaagccggataagggcgtggtgaaatggggggcgacggtttcaaaaggctatttccctcaaaacgtgagcgaagaaattagcggggaagagaccttgtatcaatggctctttaacttcaataaaaagattgaaagcgctgaggttaggaacgctttagggaggatgctgtttaatggcgaagagcaagaaaaatgcgtgaacgctttaagtgggggcgaaaaacaccgaatggttttatccaagctcatgctagagggggggaattttttagtcttagatgagccaaccaaccatttggatttagaagcgattatcgctttaggcgaagcgctctttaaatttgatggggcgctgatttgcgtaagccatgacagagagctcattgatgcgtatgctaataggatcattgaattagtcccaagccctaaaggcgcttcaatcattgattttaaaggcagttatgaagagtatttggcgagcaaaaaatgaaaccgcaagacattgaaatcgttcaaagcgttttagagattacaggacc

SEQ ID NO: 140 - protein, 404 aa, Helicobacter pylori
  VARIANT 146, 147, 148: Xaa = Any Amino Acid
MYECEVAIEKILEDLGIPSSKHNDLMKTLPSSDKFKILLAQVLFPKPDILLLDEPTNNLDLNAIEWLENNLKRHEGTMVVISHDRHFLNAVCTHILDLDFHSVREFSGNYDDWYIASTLIAKQQEAERNKKLKEKEELEKFIARFXXXASKAKQATSRQKQLDKLDIQSLAVSSRRDPSIIFKPKRTIGNEALECENISKSYDDQIVLNQVSLKVMPKDKIALIGPNGVGKSTLCKILVEELKPDKGVVKWGATVSKGYFPQNVSEEISGEETLYQWLFNFNKKIESAEVRNALGRMLFNGEEQEKCVNALSGGEKHRMVLSKLMLEGGNFLVLDEPTNHLDLEAIIALGEALFKFDGALICVSHDRELIDAYANRIIELVPSPKGASIIDFKGSYEEYLASKK

SEQ ID NO: 141 - DNA, 801 bp, Helicobacter pylori
  CDS (19)...(756)
aaaagcagggatactagaatgcaaatgatgcacaatttgagttttttgggcatgtttttagccgctttgagcatgtctttagggcattgtgtgggcatgtgtggggggattgtgagcgcgttcagtcaaataagattttctaaagttacaagcttttcttaccagctcacttgccatgccctttataatgtagggaggatcagcacttacatgcttttaggggctatagcggcaagtttggggcatagtcttagcgtgagcatgggttttaggggtgttttattcattagcatggggattattttgatctgtttagcgttgctaggggcaagaatggaaaaattaagctttcaaatcccttttatttcttttttgatgaaaaaaaccttgcaatctcaaaacattctagggctgtatttcttaggcgtgttgaacgggtttttaccttgcatgatggtgtattcgtttttagcgagcgtgattctcagtcatagcgcgtttatgggagcgatgctaggcctttcttttgggcttggcaccagcatgccgttgtttttaatggggatttttttaagcaaaatttccgtttcttacaggaaatttttcaatcttttgtctaaaattttaatgggggtttttgggctttatatcctttatatggggatcatgctcattaaccacaaaatgcctcatgccatgcatcatcaaaacaacaccactcagcatgatcataaaggagtgcattcgcatgaacactaacaaagccctttttttggacagagacggcattatcaatattga

SEQ ID NO: 142 - protein, 246 aa, Helicobacter pylori
MQMMHNLSFLGMFLAALSMSLGHCVGMCGGIVSAFSQIRFSKVTSFSYQLTCHALYNVGRISTYMLLGAIAASLGHSLSVSMGFRGVLFISMGIILICLALLGARMEKLSFQIPFISFLMKKTLQSQNILGLYFLGVLNGFLPCMMVYSFLASVILSHSAFMGAMLGLSFGLGTSMPLFLMGIFLSKISVSYRKFFNLLSKILMGVFGLYILYMGIMLINHKMPHAMHHQNNTTQHDHKGVHSHEH

SEQ ID NO: 143 - DNA, 735 bp, Helicobacter pylori
  CDS (1)...(693)
  misc_feature 9, 12: n = A,T,C or G
aactgcctntcntcgctcaacacgattgtattaaaccataataaattgtattctttagaaaaacgagggtatgtgatagaggtggatttaaatgattttgattcgtataatgtctataaaacgccaactataggcagttttaagtttttttcatctaatcgtttggataaaggggtgttttatgataaaaatcgggtgtattacgatcgctactatttagattataacgattttaaaccaaaactttatcccgttgtggaaaaatcggcatctaaaaaatctcaaaaaggcgaaaaagggaacgctcctatttatttgcaagaaaggcataaagctaaagaaaataaacagcctttagaagaaaacaaagttaaaccaagaaatagcgggtttgaagaagaagaggttaaaaccagaaggcctgagcctattagggatcaaaataacgccacccaacaaggcgaaacaaaaaacaatgaaagtaaaaacgctcctgtcttaaaagaaaacgccgctaaaaaagaagtgccaaaaccaaattctaaagaagaaaaacgccgcttgaaagaagaaaagaaaaaagccaaagccgaacaaagagcgagagaatttgaacaaagagcgagagagcatcaagaaagagatgaaaaagagcttgaagaaagaagaaaagctttagaaatgaataagaagtaggcctatgccagctaggcaatcttttacagatttgaaaaa

SEQ ID NO: 144 - protein, 231 aa, Helicobacter pylori
  VARIANT 3, 4: Xaa = Any Amino Acid
NCXXSLNTIVLNHNKLYSLEKRGYVIEVDLNDFDSYNVYKTPTIGSFKFFSSNRLDKGVFYDKNRVYYDRYYLDYNDFKPKLYPVVEKSASKKSQKGEKGNAPIYLQERHKAKENKQPLEENKVKPRNSGFEEEEVKTRRPEPIRDQNNATQQGETKNNESKNAPVLKENAAKKEVPKPNSKEEKRRLKEEKKKAKAEQRAREFEQRAREHQERDEKELEERRKALEMNKK

SEQ ID NO: 145 - DNA, 1047 bp, Helicobacter pylori
  CDS (34)...(1005)
  misc_feature 976, 979: n = A,T,C or G
agaaagaaaccattcaaggaacgcattgatttgatgaataaaccatttttaatcttactcatagccctaattgtctttagcggctgtaacatgagaaaatatttcaaacccgctaaacaccaaattaaaggcgaagcgtatttccctaaccatttgcaagaaagtatcgtttcgtctaatcgttatggagccattttgaaaaatggagcggttataggcgataaaggtttaacgcagctaagaatcggtaagaacttcaattacgaaagcagttttttaaatgagagtcaagggttttttattcttgcgcaagattgtttgaacaagattgataaaaaaacaaacaaaagcaaggtggctaagactgaagaaacggaattgaaattaaagggcgttgaagcggaagtccaagataaagtctgtcatcaagtggaattgattagcaataaccctaacgccagccaacaatctatcgttattcctttggagacttttgccttgagcgcaagcgttaaagggaatcttttagcggtggtgttagcggacaattcagcgaacttatacgacatcacttctcaaaaattgctttttagtgagaaaggttccccaagcaccacgatcaattctttaatggcgatgcctatttttatggatacggtcgtggtgttccccatgctagatgggcgcttgttggtcgtggattatgtgcacggaaaccctacgcctattagaaacattgttatcagcagcgataagttttttaacaatatcacctaccttatcgtagatggcaataacatgatcgcttctacagggaaaaggatactctcagtagtgagcggtcaagagttcaactatgatggggatattgtggatttgctttatgataaggggactttatatgtgctcacgctagacgggcagattttgcaaatggataagagtttgagggaattaaacagcgtgaaactgcctntcntcgctcaacacgattgtattaaaccataataaattgtattctttagaaaaacgagggtatgtgataga

SEQ ID NO: 146 - protein, 324 aa, Helicobacter pylori
  VARIANT 315, 316: Xaa = Any Amino Acid
MNKPFLILLIALIVFSGCNMRKYFKPAKHQIKGEAYFPNHLQESIVSSNRYGAILKNGAVIGDKGLTQLRIGKNFNYESSFLNESQGFFILAQDCLNKIDKKTNKSKVAKTEETELKLKGVEAEVQDKVCHQVELISNNPNASQQSIVIPLETFALSASVKGNLLAVVLADNSANLYDITSQKLLFSEKGSPSTTINSLMAMPIFMDTVVVFPMLDGRLLVVDYVHGNPTPIRNIVISSDKFFNNITYLIVDGNNMIASTGKRILSVVSGQEFNYDGDIVDLLYDKGTLYVLTLDGQILQMDKSLRELNSVKLPXXAQHDCIKP

SEQ ID NO: 147 - DNA, 410 bp, Helicobacter pylori
  CDS (16)...(366)
agattaaggtttagtatgcatgaatactcggtcgtttcttctttaatcgctctttgcgaagagcatgcgaagaaaaatcaagcccataagattgaaagagtcgtggtcggtattggtgaaagaagtgctatggataagagcttgtttgtgagtgcgtttgagacttttagagaagaatctttggtgtgtaaagacgctattttagacattgtagatgaaaaggttgaattagaatgcaaggattgttcgcatgtttttaagcctaacgcgctagattatggggtgtgtgagaaatgccacagcaagaatgttattatcactcaaggcaatgaaatgcgtttgttgtctttagaaatgttagcggaataaccgatgcaagaagaattgaacgcttaccagcaagaaattga

SEQ ID NO: 148 - protein, 117 aa, Helicobacter pylori
MHEYSVVSSLIALCEEHAKKNQAHKIERVVVGIGERSAMDKSLFVSAFETFREESLVCKDAILDIVDEKVELECKDCSHVFKPNALDYGVCEKCHSKNVIITQGNEMRLLSLEMLAE

SEQ ID NO: 149 - DNA, 840 bp, Helicobacter pylori
  CDS (38)...(769)
ttgcaaaaactctcattaaaaacaaggagcaaaaaagatgaaaaaggcgggctttctttttttagcggtaatggctatcgttgttatgagtttaaacgctaaagatccgaatgtgttgcgtaagattgtttttgagaaatgtctgcctaattatgagaaaaatcagaatccttcgccatgcatagaagtcaaacccgatgccggctatgtggttttaaaagatattaacggcccgttgcaatatttgttgatgccaacaactcacattagcggtattgaaagccctttgttacttgatccttctacgcctaactttttttatttatcctggcaagcgcgtgattttatgagtaaaaaatacggccaacccattcctgattatgcgatttctttgacgattaactctagcaaagggcgatcgcaaaaccattttcatatccatatctcttgcattagtcttgaagcacgcaaacagctggataataacctaaaaaaaatcaacagccgttggtcgccattaccgggcggtttgaatgggcataaatacttggcgcgtcgggtaacagagagcgagttagtgcaaaaaagcccgtttgtcatgcttaataaagaagtgcctaatgcgtacaaacgcatgggggactatggcttagcggtggtgcaacaaagcgataactcctttgtcttattagcgacacaatttaacccattgactttaaatcgcgcttcagccgaagagattcaagatcatgaatgcgcgattttgcactaaagcgagttagattcttaagcttgagcgataacctttaaaaagcgttatggggtggtgttgcaaaaccc

SEQ ID NO: 150 - protein, 244 aa, Helicobacter pylori
MKKAGFLFLAVMAIVVMSLNAKDPNVLRKIVFEKCLPNYEKNQNPSPCIEVKPDAGYVVLKDINGPLQYLLMPTTHISGIESPLLLDPSTPNFFYLSWQARDFMSKKYGQPIPDYAISLTINSSKGRSQNHFHIHISCISLEARKQLDNNLKKINSRWSPLPGGLNGHKYLARRVTESELVQKSPFVMLNKEVPNAYKRMGDYGLAVVQQSDNSFVLLATQFNPLTLNRASAEEIQDHECAILH

SEQ ID NO: 151 - DNA, 481 bp, Helicobacter pylori
  CDS (22)...(441)
atattgaaagataatcaaaaaatgaagacaagcgctaaagtattattgactttattgattgtaatatcattaggtaagggattaaatagtctcatatcagcttggcgtggcaaagatgatgcgatccccattgaaacaagactccataaaaacaaactgacaatcatttctaaaacagacagcatagaaatccaagacattcagtttaatagagagaattgttctcacacttatactagtaaggatttggaaaaaattcaaaaagatttagaagagcttgaagaaggagtgcctgaattgttcgaggagcttgagcgtgatgaagagtccatcgctaaaaataaaaaaacgatccaagagtatcaaaataaaattgctaattttcaaaaatactataaagatataaaagatattgacgattattcggcgttaatggctcaatgaacataaagattcttatacttgggataatgatcttgat

SEQ ID NO: 152 - protein, 140 aa, Helicobacter pylori
MKTSAKVLLTLLIVISLGKGLNSLISAWRGKDDAIPIETRLHKNKLTIISKTDSIEIQDIQFNRENCSHTYTSKDLEKIQKDLEELEEGVPELFEELERDEESIAKNKKTIQEYQNKIANFQKYYKDIKDIDDYSALMAQ

SEQ ID NO: 153 - DNA, 540 bp, Helicobacter pylori
  CDS (28)...(486)
  misc_feature 409, 457: n = A,T,C or G
gaaaattaggtaataaatacaaccagtatgctaaaaaaaatatttttaaccaacagcttagggattttatgctctaggatttttggctttttacgggatttgatgatggctaatattctaggggctggggtgtatagcgatattttctttgtggctttcaaattgcctaatttattcaggcgtatttttgcggagggctctttttcacaaagctttttaccgagcttcatacgaagttctattaaagggagctttgcgagtttggtagggcttattttttgtatcgttttattcatgtggtgcttattggtggcgttaaatcccttatggctagctaaactcctagcttacggctttgatgaagaaacgctcaaattatgcgcccctattgtagcgatcaatttttggnatcttttattggtgtttatcaccacctttttaggcgcgcttttacaantacaaacacagcttttttgccagcgcttatagcgcaagcttactcaatgtatgcatgattttagcccttttgatttctaaaga

SEQ ID NO: 154 - protein, 153 aa, Helicobacter pylori
  VARIANT 128, 144: Xaa = Any Amino Acid
MLKKIFLTNSLGILCSRIFGFLRDLMMANILGAGVYSDIFFVAFKLPNLFRRIFAEGSFSQSFLPSFIRSSIKGSFASLVGLIFCIVLFMWCLLVALNPLWLAKLLAYGFDEETLKLCAPIVAINFWXLLLVFITTFLGALLQXQTQLFCQRL

SEQ ID NO: 155 - DNA, 1080 bp, Helicobacter pylori
  CDS (39)...(1016)
ttctttgttcagattaatcgttcttaaaaggaagcgtgatgcttaaaacctatcatatcgccttagcttgcgtgattttagcggtggtggtgctgttgtttggaggggagtccttgagcttggaagaatggcaagaagtgtgccttaatgtgaaaaaccactttttgcacaatgaagaactgagctctttaagtattattattttagaaatacgactaccacgagtgattttagcgctcctggtgggagcgagtttgtctgggagtggggtggtgatgcaaacgatttttagaaaccccttagtggatccctttttactagggatttctagcggggcgatgctaggcgtggcgatggcgatagcggtagtggagtctaacattgcgattttggcgttttttggggcgattttagctagccttgctgttttggcgatgaatagggttttgggtaattccgtcctttcgttggtgctttcaggggtggtgttgagcgcgtttttaagcgccttagccggagcgataaaattctttgtgatcccccaaaaagcgcaagcgattgtcgtgtggcttttagggagcttgtcgttgagcagttataaggattgcttgatcgctttcatagggctatctttaggctttatcccgctttttttgttaaggtggcgcatcaatttattgagcttgagcgatgcgcaaagtttgagcttggggattaacccggtgctgttgcgatcgctttgtttggtgtgcgtgagcgttgcgagcgctttagcggtgagcgtgtccggcacgattggctggattgggttagtcattccgcatgtggctaggttgttttttggggcgaatttgcaaaaactgcttttaagttctttgttaatgggagcgtttttcttgcttctagcggatgtggtggctaaaaccattaccccctatgatttaccggtaggcattgcgacaagcgttttaggagcgcctttcttcttgtggcttttgtttagaactaggggggtgtgatggttttagaagttaaaaacctgtcctttaaatattctcaaaaactcattttggataaatt

SEQ ID NO: 156 - protein, 326 aa, Helicobacter pylori
MLKTYHIALACVILAVVVLLFGGESLSLEEWQEVCLNVKNHFLHNEELSSLSIIILEIRLPRVILALLVGASLSGSGVVMQTIFRNPLVDPFLLGISSGAMLGVAMAIAVVESNIAILAFFGAILASLAVLAMNRVLGNSVLSLVLSGVVLSAFLSALAGAIKFFVIPQKAQAIVVWLLGSLSLSSYKDCLIAFIGLSLGFIPLFLLRWRINLLSLSDAQSLSLGINPVLLRSLCLVCVSVASALAVSVSGTIGWIGLVIPHVARLFFGANLQKLLLSSLLMGAFFLLLADVVAKTITPYDLPVGIATSVLGAPFFLWLLFRTRGV

SEQ ID NO: 157 - DNA, 410 bp, Helicobacter pylori
  CDS (37)...(363)
ctagctaaaatcgccccaaaaaacgccaaaatcgcaatgttagactccactaccgctatcgccatcgccacgcctagcatcgccccgctagaaatccctagtaaaaagggatccactaaggggtttctaaaaatcgtttgcatcaccaccccactcccagacaaactcgctcccaccaggagcgctaaaatcactcgtggtagtcgtatttctaaaataataatacttaaagagctcagttcttcattgtgcaaaaagtggtttttcacattaaggcacacttcttgccattcttccaagctcaaggactcccctccaaacaacagcaccaccaccgctaaaatcacgcaagctaaggcgatatgataggttttaagcatcacgcttccttttaagaacgattaatctga

SEQ ID NO: 158 - protein, 109 aa, Helicobacter pylori
MLDSTTAIAIATPSIAPLEIPSKKGSTKGFLKIVCITTPLPDKLAPTRSAKITRGSRISKIIILKELSSSLCKKWFFTLRHTSCHSSKLKDSPPNNSTTTAKITQAKAI

SEQ ID NO: 159 - DNA, 711 bp, Helicobacter pylori
  CDS (39)...(662)
aggaaaaatggctggggtgcaaggattcgaacctcggaatgccaggaccaaaacctggtgccttaccgcttggcgacaccccaaaaactaaagaaagcattatacaaaagctttttaaaaaagtcaagctaaaacgctataattttatcatggaaaatggatttgaccccatcatttataaacgctatttgaaaaagaaagaaacctttttgctgtttaaaaaaatcgctcaagcgtctgcgtttaaaaatttaaaactccaactcaaacgaagagaaataatcaaccgctatgtttctcaagctttgggggatttaaaaaaagggtttagatacgctaaagtagaacaccaaatcctaaaaatctatttcacgcaccctagctatttgaaagcctttaaaatagaagaagcctattacaccaaccacctgaaagcccatttaaaagaaacgcaaaaaaccctaaaagccctagattacccctttgattttaagactatccaagcgagcgtgaaaaaaagggcttatcaaaaaccagttgttaaaaaagaaaaaccccctaaaagcgtgaatgtcaattgcgaaggtttgagcgatttcactaaaaagcaatttttaaagctcaaacgcgcttgtaacgataatacgctgcgcacgcccccttgagagctgaccatgcaactgccgatcgggttttgcggggtgcaagttt

SEQ ID NO: 160 - protein, 208 aa, Helicobacter pylori
MPGPKPGALPLGDTPKTKESIIQKLFKKVKLKRYNFIMENGFDPIIYKRYLKKKETFLLFKKIAQASAFKNLKLQLKRREIINRYVSQALGDLKKGFRYAKVEHQILKIYFTHPSYLKAFKIEEAYYTNHLKAHLKETQKTLKALDYPFDFKTIQASVKKRAYQKPVVKKEKPPKSVNVNCEGLSDFTKKQFLKLKRACNDNTLRTPP

SEQ ID NO: 161 - DNA, 486 bp, Helicobacter pylori
  CDS (85)...(426)
tgaatcacagctgagaccattagacccgctttacaaatcatcaaaactaaacccggcgtgagcctggtttcaagcgtgtttttaatgtgtttagacactcaagtgctagtctttggggattgcgcgattatccctaaccctagccctaaagaattagccgagatcgctaccacttccgcacaaaccgccaagcaattcaatattgcgcctaaagtggccttgctttcttatgcgacaggcgattccgctcaaggcgaaatgatagacaaaatcaacgaagctttaacaatcgctcaaaagttggatccccaattagaaattgatggccccttacaatttgacgcttccattgataaaagcgtagccaagaaaaaatgcctaacagccaagtggctgggcaagctagcgtttttattttcccggatttaaacgctgggaacatcgcttataaagcggtgcaacggagcgctaaagccgtggcgatag

SEQ ID NO: 162 - protein, 114 aa, Helicobacter pylori
MCLDTQVLVFGDCAIIPNPSPKELAEIATTSAQTAKQFNIAPKVALLSYATGDSAQGEMIDKINEALTIAQKLDPQLEIDGPLQFDASIDKSVAKKKCLTAKWLGKLAFLFSRI

SEQ ID NO: 163 - DNA, 1151 bp, Helicobacter pylori
  CDS (38)...(1111)
agggcaggttttcacccctaaaaagatagtggatttcatgctcactctcaaacacaatcatgggagtgttttagaaccgagtgctggcgatgggagttttttaaagcgcttaaaaaaggccgtaaggattgaaatcgatcctaaaatctgccctaaaaatgccctttgcatggacttttttgactaccctttagaaaatcaatttgacaccattattggtaacccgccctatgtcaagcacaaggatattgcgccaagcaccaaagaaaaactccattacagcctttttgatgaaaggagtaatctctacttgtttttcatagaaaaagcgatcaagcatttaaaacctaaaggcgaattgattttcatcaccccaagggattttttaaaatccacttctagcgtgaaattaaacgaatggatttataaagaaggcacgataacgcatttttttgaactgggcgatcaaaaggttttcccaaacgccatgcctaattgcgtgatttttcgtttttgtaagggtaatttcagtagaatcaccaacgatggtttgcaatttttgtgcaaaaaaggcattttgtatttcctcaaccaatcttacacgcaaaaattaagcgaggtttttaaggttaaagtgggggcagtgagcgggtgcgataagatttttaaaaatgaaaaatacgggaatttagaatttgtcacctcaatcacgaaaagaaccaatgctttagaaaaaatggtttttgtcaatgagcctaatgattatttactccagcataaagacagcttaatgcaaagaaagattaaaaaattcaatgaaaataactggtttgagtgggggagaatgcatcacatatcccctaaaaaacgcatttatgtcaacgccaaaacgcaccaaaaaaaccccttttttatccaccaatgccctaattatgacggctctattttagcgctattcccttataaccaaaacctggacttacaaaatctctgcgacaaactcaacgctatcaactggcaagaattaggctttgtgtgcggcgggcgttttttgttttcgcagcgctctttagaaaacgcgcttttgcctaaagactttttaaatctaggataaaacttgttagaaactttgcaattaaaccctgagcagc

SEQ ID NO: 164 - protein, 358 aa, Helicobacter pylori
MLTLKHNHGSVLEPSAGDGSFLKRLKKAVRIEIDPKICPKNALCMDFFDYPLENQFDTIIGNPPYVKHKDIAPSTKEKLHYSLFDERSNLYLFFIEKAIKHLKPKGELIFITPRDFLKSTSSVKLNEWIYKEGTITHFFELGDQKVFPNAMPNCVIFRFCKGNFSRITNDGLQFLCKKGILYFLNQSYTQKLSEVFKVKVGAVSGCDKIFKNEKYGNLEFVTSITKRTNALEKMVFVNEPNDYLLQHKDSLMQRKIKKFNENNWFEWGRMHHISPKKRIYVNAKTHQKNPFFIHQCPNYDGSILALFPYNQNLDLQNLCDKLNAINWQELGFVCGGRFLFSQRSLENALLPKDFLNLG

SEQ ID NO: 165 - DNA, 1183 bp, Helicobacter pylori
  CDS (51)...(1130)
  misc_feature 1028: n = A,T,C or G
cctaaagcggagaataaagttacagaagtcctagcgagcaaaacaatgtgatggctaagatcaatggttatttgagcgaaagggatattttaacgctcagttataacatgaccagagacaacgctaaccgccctttaagagcgaattttacaggcacttttttaccctattcttgcggtgattttaacgctttccctaacgagaaaaaccctagcgattgtttgtttgaaaacgacgctagtttgtttaaaacttatagcgtcaatttagtgcataatgtgagtttgaattatgaaagagaaggggggagccgttttggtgatcctaaattaaaaatcaatggctatacaagcattaggaatgtccaaattgatccgctttttaagcctaacgacatagcggctagtattcctttcaccccaaacccaaaacttggcgaagagaatgaatgcgtggcgcaagggggcatttatgacgctcttaaacaaacttgctccatcacttttaaaagccttggagggggttctgtggtggctaataaaaatttattcatcatcaattctgggtttaatgcgaacgtgatccacaccatagaccataagaatgacaaccttttggaatacgggttgaattaccaaaacttaaccacttttgataaagcgatccctaatagcgaattagtcaaacccggcgatgcccctgacgcatgcttaagggttacaagccccaatgatcccaacatgaacgggcgttgccaacgaaatggcgctacggcgaatgtgattggggtgtatgcgcaagcgaattacaccttgcatcctatggtaactttaggggcagggactcgttatgatgtctatactttagtggataaagactggcaattgcacataacccaagggtttagccctagcgcggctttaaatgtctcgcctttagaaaatttgaatttcaggctttcttatgcgtatgtaaccagaggccctatgcctggaggtttggtgtggatgcgtcaagataatttgcgnctacaaccgcaatttaaagccagaaattgggcaaaatgtggaattttaacaccgaatacagcagtcagtattttgattttagagccgccggttttgtccaattgatttctaattacatcaatcaattttcttcaacgctttttgtaaccaacttg

SEQ ID NO: 166 - protein, 360 aa, Helicobacter pylori
  VARIANT 326: Xaa = Any Amino Acid
MAKINGYLSERDILTLSYNMTRDNANRPLRANFTGTFLPYSCGDFNAFPNEKNPSDCLFENDASLFKTYSVNLVHNVSLNYEREGGSRFGDPKLKINGYTSIRNVQIDPLFKPNDIAASIPFTPNPKLGEENECVAQGGIYDALKQTCSITFKSLGGGSVVANKNLFIINSGFNANVIHTIDHKNDNLLEYGLNYQNLTTFDKAIPNSELVKPGDAPDACLRVTSPNDPNMNGRCQRNGATANVIGVYAQANYTLHPMVTLGAGTRYDVYTLVDKDWQLHITQGFSPSAALNVSPLENLNFRLSYAYVTRGPMPGGLVWMRQDNLXLQPQFKARNWAKCGILTPNTAVSILILEPPVLSN

SEQ ID NO: 167 - DNA, 431 bp, Helicobacter pylori
  CDS (31)...(387)
agactgaataaaatcgcactcgctcccgcaatgacaacctggaacatggggctgcccaaaaacaagttaatgagcgaacacaccaccaccacaatcaaagcgatgaagagcattttacccatattcgctagatcgtttttagtcttaagggcatacacgctcatcaaaccaaagacaatagttgtcatgcccaaagcctgccaaatcgctcctaaaccagcttttgcaatcaccatacccaacaaaggcactagcgtaacccctgataatgaagtgaaagcaaacagcatgaacagattcaatccgggtttagatttagaaaacatcaaaccaaaaaacgccgcaatttcagcgataaaaaacacccatttatactgcactacggcttgaaaattcattaaacctagtaacgccccaatagtcgctaataa

SEQ ID NO: 168 - protein, 119 aa, Helicobacter pylori
MTTWNMGLPKNKLMSEHTTTTIKAMKSILPIFARSFLVLRAYTLIKPKTIVVMPKACQIAPKPAFAITIPNKGTSVTPDNEVKANSMNRFNPGLDLENIKPKNAAISAIKNTHLYCTTA

SEQ ID NO: 169 - DNA, 671 bp, Helicobacter pylori
  CDS (21)...(599)
aagtttgatatactaacagaatgaatacttataaaaacagcttgaatcactttttaaatttagtggattgtttagaaaaaatccccaatgtgggtaaaaagtccgcctttaaaatggcgtatcatttgggtttagaaaacccctatctggcgctaaaaatcacgcacgctttagagaacgccctagaaaaccttaaaacatgttcatcttgtaacgcgctcagcgagagtgaggtttgtgagatttgctctgatgaaagccgacaaaattctcagctttgcatggttttacacccaagagatgtgtttattttagaagatttaaaggattttttagggcgctattatgtgttaaactccatagaagaagtggattttaacgccctagaaaaacgcctgattgaagaaaacattaaagaaatcatttttgctttccctcccactttagctaatgattctctaatgctttatattgaagacaaattacagcatttccacctcactttcactaaaatcgctcaaggcgtgcctactggagtgaattttgaaaacattgactcagtttcgctctcaagggcgtttaattcaaggatcaaagcatgaatttaaattttatgcccctattgcatgcttataaccatgcgagcattgattttcatttcaattctagtg

SEQ ID NO: 170 - protein, 193 aa, Helicobacter pylori
MNTYKNSLNHFLNLVDCLEKIPNVGKKSAFKMAYHLGLENPYLALKITHALENALENLKTCSSCNALSESEVCEICSDESRQNSQLCMVLHPRDVFILEDLKDFLGRYYVLNSIEEVDFNALEKRLIEENIKEIIFAFPPTLANDSLMLYIEDKLQHFHLTFTKIAQGVPTGVNFENIDSVSLSRAFNSRIKA

SEQ ID NO: 171 - DNA, 846 bp, Helicobacter pylori
  CDS (26)...(793)
  misc_feature 48: n = A,T,C or G
aaaaaattcaggattaaaatataaaatgaaaaaagttttatttttgtnggtaataagcttttttgggggttttttgaacgcttctagcttgtatgaaaaactgattaataaagaaacgatcagcgttggcacagaaggcatttacccccctttcacttaccacaataaagaaggcaagctcaccggctatgatgtggaagtggctagggagttggccaaagagcttggcgtgaagatcaaattccacgaaacttcatgggatatcatgctgacaggtttgaaatcggggcgttttgatatggtcgctaaccaagtgagtttggcgactaaaaaacgccaagcggcttttgataaaagcttgccttatagctattcaggcacgatcatgctggtcaggaaagatgaaaaccgcattaaagatattaaagacatcaagggtttgagagcggctaacactttaagctccacttatggggaaatcgcttttaaatacgacgctcaaatcgtttcggtggattctatggcgcaagctttgttgctggtggcgcaaaaacgagccgatttgaccttaaatagttctttagcgatcttaaactaccttaacacccacaaagataacccctttaaaatcgcatgggagtccaaagaaaaagatgggggcgcttcctttgttattaacaagcaccaagaaaaagccttagagcttatcaaccaagcgatgcaaagattgatcaacaaaggggttttaaaacgcttaggcgaacaattttttggaaaagatgtcagccagccctaatctgtctttgttttttgaatctttagatttgagcaaggagcgtttggaat

SEQ ID NO: 172 - protein, 256 aa, Helicobacter pylori
  VARIANT 8: Xaa = Any Amino Acid
MKKVLFLXVISFFGGFLNASSLYEKLINKETISVGTEGIYPPFTYHNKEGKLTGYDVEVARELAKELGVKIKFHETSWDIMLTGLKSGRFDMVANQVSLATKKRQAAFDKSLPYSYSGTIMLVRKDENRIKDIKDIKGLRAANTLSSTYGEIAFKYDAQIVSVDSMAQALLLVAQKRADLTLNSSLAILNYLNTHKDNPFKIAWESKEKDGGASFVINKHQEKALELINQAMQRLINKGVLKRLGEQFFGKDVSQP

SEQ ID NO: 173 - DNA, 1423 bp, Helicobacter pylori
  CDS (23)...(1372)
cctagtttattaaggagtttttatggaaacgattgattcggtggtgcgtttgttatctaatttggtgtgggggattcccatgcaaattttattagtaggcaccggcttgtttttaaccttttatcttaggggtttgcaattcagtaagattttttatgcgatcaaaatcctttttgacaaagagtcccaatctaagggcgacatttcacaattttccgctctcatgctctctttgggggcgactgtaggcattgggagtatcgtaggcgtagcgaccgctattagcatcgcagggccaggagcggtgttttggatgtgggttactgggcttgttggcatggcgactaagtattctgaggggattttagcggtgaaataccgggaaaaaggggcgtttggatacaacggagggcccatgtattacatcaaaaacggtcttaacatgcccaaactcgccatggcgtttgcgatttttacgattattgcaagcattggcaccggtaacatgacgcaatctaatgcggtttcttccattttaagcgaacaagcgaacctgcctaattgggtttcaggtttattgctcactcttttaaccgctttcattgtcataggggggatcaaatccattggtaaattcacttcttacttagctcctgttatggtgcttttatatttgatcgctattatttatattattgttagccattttgatttagcccttcaagcgatcaaactcatttttgaagaagcctttaaccctaaacccgttgtgggcggagcgagcggcgcgttgatagcgacgatgataaaaacgggcgtggctagggggttgtattctaatgaagcggggttagggagctcagccattattgccgcgagcgctcaaacacgccacccggtgcgccaagccttagtgtccatgctccaaacttttattgtaaccttaatagtgtgttcggcaacagcgagcgtgattttaatggctccagaatacaacaccttgctccctaatggggaaaaattaagcgctaatttgctcactctaaaaagcacggagtattttctaggctcattagggacggtggtgatttttacaaccatgatcttttttgcctactctacgatcattggttgggcttattatggggaaaaatgcactgaatacgcctttggtgaaaaaaaagtgaaatattaccgcttgatctttttagcgagtgtgatggtgggggctatggccaaaattgattttgtgtggaatttagcggatctttctaacgggcttatggctatccctaatttaatcgctttgattttattgcataaagtggtttattctgaaactcgttggtattttagcaagcattctaacaagtaaaatggcatgttaaaaagggcgagttttgtagaagtggataccgcttct

SEQ ID NO: 174 - protein, 450 aa, Helicobacter pylori
METIDSVVRLLSNLVWGIPMQILLVGTGLFLTFYLRGLQFSKIFYAIKILFDKESQSKGDISQFSALMLSLGATVGIGSIVGVATAISIAGPGAVFWMWVTGLVGMATKYSEGILAVKYREKGAFGYNGGPMYYIKNGLNMPKLAMAFAIFTIIASIGTGNMTQSNAVSSILSEQANLPNWVSGLLLTLLTAFIVIGGIKSIGKFTSYLAPVMVLLYLIAIIYIIVSHFDLALQAIKLIFEEAFNPKPVVGGASGALIATMIKTGVARGLYSNEAGLGSSAIIAASAQTRHPVRQALVSMLQTFIVTLIVCSATASVILMAPEYNTLLPNGEKLSANLLTLKSTEYFLGSLGTVVIFTTMIFFAYSTIIGWAYYGEKCTEYAFGEKKVKYYRLIFLASVMVGAMAKIDFVWNLADLSNGLMAIPNLIALILLHKVVYSETRWYFSKHSNK

SEQ ID NO: 175 - DNA, 367 bp, Helicobacter pylori
  CDS (49)...(333)
tttaaattaagcccgaaatggaattttaaaggggcttggtttttgagcatgagcttcagggtgtctaacaccacaccagggcatgagagtggggcttttttaaacgcagaaataagcccagcattcccaaaagaagtgccgtttgcgccatcgtttttttctatcacgcagaccttatgccctaacttgtgcatagaatacgcacaagaaagccctacaatcccaccgcctatgaccacgacctcttttttcatgctgatagtccctttaataaattacttaatggctatcgcttcaatttctactaaagcgtctttaggcagtttagccacttgaaaggtcgctctggccggataaggctctgtaa

SEQ ID NO: 176 - protein, 95 aa, Helicobacter pylori
MSFRVSNTTPGHESGAFLNAEISPAFPKEVPFAPSFFSITQTLCPNLCIEYAQESPTIPPPMTTTSFFMLIVPLINYLMAIASISTKASLGSLAT

SEQ ID NO: 177 - DNA, 756 bp, Helicobacter pylori
  CDS (36)...(689)
gcgcacgctgaatttagggttttgaaaggttaaaaatgaaatttaaatttttgaatatggataatgaaagcggttttattttgattgaaaaagaattgaaacgattaaacattctcgctcaagtcaaagaagattgcattgaattaaaaggcgaaaacacagaacaagcgagaatttatcttaaaacgctttttaactccaatattgtagaattagacgatcatcaaaaaagtgcaaacgctttaatagagcgcttgaaatctttagatttaaaaattgcggtggctgaaagctgctctggggggctattatcgcatgcattcacttccattagcggggcttcagcggtttttatggggggtattgtgtgctacaatgaagaggttaagcgcgaattattgaaggtcaatgccacgactttaaaagtctttggggtttatagcgaagaatgcgtgaaagaaatgctactaggcgtgtttttgaattttaaagtggatttagcgcttgcgatgagtggggtggctggccctaatggggggaacaaggctaatcctgtaggcacgatttacattggcgcgcaaaagttaggatctcaagctttaatcgatcgctgtttttttgaagggaacagagaaagcattcaaaataaaagcgtagagcatgccttaaacatgctcgctagaatgctataaaactaccttaacgcacaaacgctaccaaattctttttgagcgaccttagcgatgtaagcgattt

SEQ ID NO: 178 - protein, 218 aa, Helicobacter pylori
MKFKFLNMDNESGFILIEKELKRLNILAQVKEDCIELKGENTEQARIYLKTLFNSNIVELDDHQKSANALIERLKSLDLKIAVAESCSGGLLSHAFTSISGASAVFMGGIVCYNEEVKRELLKVNATTLKVFGVYSEECVKEMLLGVFLNFKVDLALAMSGVAGPNGGNKANPVGTIYIGAQKLGSQALIDRCFFEGNRESIQNKSVEHALNMLARML

SEQ ID NO: 179 - DNA, 681 bp, Helicobacter pylori
  CDS (28)...(657)
aaattctaaaaaaataaaggaaaatcaatgaaatttttggatcaagaaaaaagaagacaattattaaacgagcgccattcttgcaagatgtttgatagccattatgagttttctagcacagaattagaagaaatcgctgaaatcgccaggctatcgccaagctcttacaacacgcagccatggcattttgtgatggttactgataaggatttaaaaaaacaaattgcagcgcacagctatttcaatgaagagatgattaaaagcgcttcagcgttaatggtggtatgctctttaagacccagcgagttgttaccacacggccactacatgcaaaatctctatccggagtcttataaagttagagtgatcccctcttttgctcaaatgcttggcgtgagattcaaccacagcatgcaaagattagaaagctatattttagagcaatgctatatcgctgtggggcaaatttgcatgggcgtgagcttaatgggattggatagttgcattattggaggctttgatcctttaaaggtgggcgaagttttagaagagcgtatcaataagcctaaaatcgcatgcttgatcgctttgggcaagagggtggcagaagcgagtcaaaaatcaagaaaatcaaaagttgatgcgattacttggttgtgattaaacaaaatcaaaaacttt

SEQ ID NO: 180 - protein, 210 aa, Helicobacter pylori
MKFLDQEKRRQLLNERHSCKMFDSHYEFSSTELEEIAEIARLSPSSYNTQPWHFVMVTDKDLKKQIAAHSYFNEEMIKSASALMVVCSLRPSELLPHGHYMQNLYPESYKVRVIPSFAQMLGVRFNHSMQRLESYILEQCYIAVGQICMGVSLMGLDSCIIGGFDPLKVGEVLEERINKPKIACLIALGKRVAEASQKSRKSKVDAITWL

SEQ ID NO: 181 - DNA, 1490 bp, Helicobacter pylori
  CDS (99)...(1439)
cttaaagaaaacatgcaaaatttgcaaaatcaagttcaaaacaaagagcaatccatcgctcaattagatgcacaaatccaagctttaaaggggattcaatgagcgttaatttttttaagggcatttttaatgacaatagcagggctgaaaaccaccaagacaaccaccaaaacaaccatcaagtgggcttaaaagagcgttacgatttgatcgctcgtattttaaacgccagaattgaaaatgaagggctagaagaatatcagagcgtcttggataacgagtttttagagttcgctagcggcgtggattcgctcaaagaaaaggaaatagcgttactgacgctccaagaaatccaaaaagaattgcaattggtagcgagctaccctagtttgttccaaaaaaccatcgttgcggtggggggagggtttagcgcgggcaaatccacttttttaaacaacttgttgggcttgaaattaaaactccctgaagacatgaatcccaccacagctatccccacttattgcttaaagggtaaaagagaagttttaatggggttttctcaaaatgggggcatggtggaattgccacatctcgcttttgaccatcagtttttaaactcccttggctttaatttgaaagagatcatgcctttcatgcttttaagcgctcctagcgtgccttttgaatttttatgcttcatagacacgcctggttttaactccgccaagcaaggctatacgggtggggataaagaagcctctaaagaatccctaaaacacgccaaacacattctgtggctcattagttgcgagagtggggagattcacgaagatgatttagaatatttgcaagaattatacgaagaaggcaagcaggtttttatcgtattgagtagggctgataggcgcacaaaaaggcaattagaagaagtcgttattaaaattaaagagactttaaaagataatggcattgaatttttagggattggtgcttatagttctacaaggtatcaagaatataaagaattcagcgaaaaaagcaaagtttttaactcgcttgaggaatttctaatgaagttaaatcaaaggagcgagaaacaaaacgaaattttaggatatttatacgaggtgcattccatgtatgaaaaggctattgagcaagacgctaaccaattcaaacgctaccaaagcgaattgcattctgttagattggatttgatgcaaaaaggctttgatgattttagcgataaaatttttagaagaattgagaatttagaaaaagaattttccgagcaagagcgatccaaaagagagagtttagcgcgattgaatgaagtgattgacttgtttaaagaaggtattgataaggtttttgatcgcgtgagcgctttcacttgggaaaaatacaaagaacaaaatgacgatgaagaggacgatgattgaagaaaactacaaagaagagcgttacaccgaaagggtgaatcaaggcgg

SEQ ID NO: 182 - protein, 447 aa, Helicobacter pylori
MSVNFFKGIFNDNSRAENHQDNHQNNHQVGLKERYDLIARILNARIENEGLEEYQSVLDNEFLEFASGVDSLKEKEIALLTLQEIQKELQLVASYPSLFQKTIVAVGGGFSAGKSTFLNNLLGLKLKLPEDMNPTTAIPTYCLKGKREVLMGFSQNGGMVELPHLAFDHQFLNSLGFNLKEIMPFMLLSAPSVPFEFLCFIDTPGFNSAKQGYTGGDKEASKESLKHAKHILWLISCESGEIHEDDLEYLQELYEEGKQVFIVLSRADRRTKRQLEEVVIKIKETLKDNGIEFLGIGAYSSTRYQEYKEFSEKSKVFNSLEEFLMKLNQRSEKQNEILGYLYEVHSMYEKAIEQDANQFKRYQSELHSVRLDLMQKGFDDFSDKIFRRIENLEKEFSEQERSKRESLARLNEVIDLFKEGIDKVFDRVSAFTWEKYKEQNDDEEDDD

SEQ ID NO: 183 - DNA, 1718 bp, Helicobacter pylori
  CDS (28)...(1674)
attttagtttttaattttaaaggattgatgatggttttacgcacacagacaaattttgtggagtttttagaacaggttttagaagttttaaaagaagtggagatcgataaaacagaatgctccacgcttttagcaagcgttcaaaaacaacagctagtgatacccgttgtggggaattttagcgcagggaaaagcacgctattaaaccgctttttaggcagcagcgttttgcctaccggtatcacgccagagacttctttagccactgagttgcactatagcgctaaggaacgcatagaggctttttcaaacaatgatgaaaaaacagagagttttgaactgaatgagcaaagttttgaagcgattaaagagaatgccacgaagtattcctaccttaaggtttatttgaataatgaagctttgaaaaacagcgctcctttagtgtttgtggatatgccaggctttgatagccccatttcaagccacacccatgccattttggaatatttagaaaggggcgtgcattttgtcattctcacaagcgtagaagagggcaatctcactaaacgcatggttagggagttaaaaaaccttttagagtttgacaaaggccttagctttattttgagtaaaacgaatttaagaacgccttcgcaagtgggagaaatctctcactacattcaagatcaaatccaggatcaccttgatttgacaacgcacctcatccattccaataaagacaataacgcccttttagaggtagcggataaaatagacgctgaaaagctttttagcgctttgtatttgaaacgattgaagtttttaaattctaagttacaaaatagcctaaaaagcgtgatggaaagctttgattattctaaagaaaaggctttagaagaaatacaagctttggatttgggcgttaaagacattgaaaaaacctatgaaaaattaagggctaatttagaagaagaatattctagcgtggctgtgggatcggtggttaaaaaagtagtagaagaggttagggatcaaaaatcctatttagcctctttaatcaacaagcctaacgagttcaatagcgaaatagaaagcatcatgcaacaaagcttgatcaaaaacgctaaattagagattgaaaagatcaacctttctttttcaaaagatttccatgcggaatttgaaagcctgaacaagctttctagcgatctgtctgtgaatttagagcatgggattgaattagggatcaacgctttaagcgtgattttttccaagaatccggttacaaggccattcgcgctgattttgcaagggttaaaatctcttttaaaagatttactgacattgttgcctaatatcatcgcttcattctttaggaatgaagaaaaagagcgggcgaaattagaaaatctgattgaagtcagagtgattccagaaatccaatacaagcttaaaaaagttttaccgggattgtttaatgaagctttgcaaaattccctaaaatctctaaaagatcggtgcgagctagaaatcacgcataaaaaacaagaaatcgcgctcgctcaaaaggaaaaagaaaaacacctaaacgatttagaagatcaaaaacaaatcttagaaaataagatcaacgctttaagcgatttagaacaacaatatttaaaggatcaacaatgaacgagcaagaactcattcaaaaaagcgctttaattgaaaaa

SEQ ID NO: 184 - protein, 549 aa, Helicobacter pylori
MMVLRTQTNFVEFLEQVLEVLKEVEIDKTECSTLLASVQKQQLVIPVVGNFSAGKSTLLNRFLGSSVLPTGITPETSLATELHYSAKERIEAFSNNDEKTESFELNEQSFEAIKENATKYSYLKVYLNNEALKNSAPLVFVDMPGFDSPISSHTHAILEYLERGVHFVILTSVEEGNLTKRMVRELKNLLEFDKGLSFILSKTNLRTPSQVGEISHYIQDQIQDHLDLTTHLIHSNKDNNALLEVADKIDAEKLFSALYLKRLKFLNSKLQNSLKSVMESFDYSKEKALEEIQALDLGVKDIEKTYEKLRANLEEEYSSVAVGSVVKKVVEEVRDQKSYLASLINKPNEFNSEIESIMQQSLIKNAKLEIEKINLSFSKDFHAEFESLNKLSSDLSVNLEHGIELGINALSVIFSKNPVTRPFALILQGLKSLLKDLLTLLPNIIASFFRNEEKERAKLENLIEVRVIPEIQYKLKKVLPGLFNEALQNSLKSLKDRCELEITHKKQEIALAQKEKEKHLNDLEDQKQILENKINALSDLEQQYLKDQQ

SEQ ID NO: 185 - DNA, 360 bp, Helicobacter pylori
  CDS (31)...(348)
tctttttcttcattcctaaagaatgaagcgatgatattaggcaacaatgtcagtaaatcttttaaaagagattttaacccttgcaaaatcagcgcgaatggccttgtaaccggattcttggaaaaaatcacgcttaaagcgttgatccctaattcaatcccatgctctaaattcacagacagatcgctagaaagcttgttcaggctttcaaattccgcatggaaatcttttgaaaaagaaaggttgatcttttcaatctctaatttagcgtttttgatcaagctttgttgcatgatgctttctatttcgctattgaactcgttaggcttgttgattaaagaggctaaataggatttttga

SEQ ID NO: 186 - protein, 106 aa, Helicobacter pylori
MILGNNVSKSFKRDFNPCKISANGLVTGFLEKITLKALIPNSIPCSKFTDRSLESLFRLSNSAWKSFEKERLIFSISNLAFLIKLCCMMLSISLLNSLGLLIKEAK

SEQ ID NO: 187 - DNA, 3179 bp, Helicobacter pylori
  CDS (61)...(3120)
cagcgtggcagtggggtcattgatagggttaaaaggcatgatcaacaatttaggggaggaatgatgctcgcttccattattgaattttccttacgccaaagagtgatcgtgattgttggtgcgattcttattttattttttgggacttatagttttatcaacactccagtggacgctttcccggatatttcgcccactcaagttaaaatcattttaaaactccccggctctagccctgaagaaatggaaaacaacatcgtgcgccctttagaattggagcttttaggcttgaaagggcaaaaatctttaaggagtgtttcaaaatattctatttcagatattacgatagattttgatgacagcgtggatatttatttagcgaggaatattgtcaatgagcgcttgagcagcgtgatgaaagatttacccgtgggggttgaggggggcatggcgcccattgttacgccgctatcagatatctttatgttcactattgatggcaatatcactgagatagaaaaacgacagcttttagattttgtgatccgcccacaattaagaatgattagcggcgtagcagatgtcaattccattggaggctttagcagagcgtttgtgatcgtgccggattttaatgacatggcaaggcttggggtgagtatttctgatttagaatcggctgtgagagtgaatttaagaaacagcggagcggggcgcgtggatagagatggcgaaacctttttagtcaaaatccaaaccgcttctttgagtttagaagacattggcaaaatcaccgtttccactaatttagggcatttgcacattaaggattttgcgaaagtcatcagccagtctcgcacccgtttggggtttgttactaaagatggcgtgggcgagaccacagaaggcttggtgctttctttaaaagacgctaacaccaaagaaatcatcactcaagtgtatcaaaaactagaagaattaaaaccctttttaccgaatggcgtgtccattaatgttttttatgatcgctcagaatttacgcaaaaagccattgccaccgtttctaaaaccctcattgaagccgttgttttaatcatcatcacgctctttttatttttagggaatttgagggcgagcgtggctgtgggggtgattttacctttaagcttgtccgtggcgtttatttttatcaagtttagcgatctgactttaaatttgatgagtttagggggattggttatcgctataggcatgctcattgactcagccgtggtggtggtggaaaacgcttttgaaaaattaagcgctaacactaaaaccactaaactccatgcaatctatcgttcgtgtaaagaaatcgctgtttcagtggtgagcggggtggtgatcatcattgtgttttttgtgccgattttaaccttacaggggttagagggtaagatgtttaggcctttagcgcaaagcattgtgtatgcgcttttaggcactttagttctatctattacaatcattcctgtagtcagctctcttgtcttaaaagccacgccccatagcgaaacctttttaacgaggtttttaaacagaatctacgcccctttattggaattttttgtgcataaccctaaaaaagtgattttaggagcgtttgtttttttaatcgcaagcctttctttattcccttttgtggggaagaatttcatgcccgttttagatgagggcgatgtggttttgagcgtggaaaccaccccttctatttctttagatcaatctagggatctcatgctaaacattgagagcgcgattaaaaagcatgtcaaggaagttaaaagcattgtcgcgcgcacagggagcgatgaattggggctggatttaggaggtttgaatcaaaccgatacttttatttcttttattcctaaaaaagaatggagcgttaaaaccaaagatgaattattagaaaaaatcatggattctttaaaagactttaaggggattaacttttctttcacccaacccattgaaatgagaatttctgaaatgctgacaggggttaggggggatttagcggttaagatttttggagatggtattagcgaattgaatgaattgagttttcaaatcgcgcaagctctaaaagggattaaaggatctagtgaagttttaaccacgcttaatgagggcgtgaattatttgtatgtaacccctaataaagaatcgatggcggatgtggggatcactagcgatgaattttccaagtttttaaaatccgctttagagggcttggttgtagatgtgatccctacagggatttcacgcacgccagtgatgatccgccaagagagcgattttgcaagctctatcactaaaatcaaaagtttagccttgacttcaaaatatggcgttttagtgcctatcacttctatcgccaaaattgaagaagtggatggccctgtttctgttgtgcgtgaaaattcaatgcgcatgagcgtggttcgcagtaatgtggtggggcgcgatttgaaatcttttgtagaagaggctaaaaaagtgatcgctcaaaacatcaaactccctcccagctactatatcacttatggggggcagtttgaaaaccagcaacgggccaataaaaggctctccaccgttatccctttaagcatcttagcgatttttttcattctttttttcacttttaaaagcattcctttagccttgctcattcttttgaatatcccttttgcggttaccggaggccttattgcgttgtttgcggtcggggagtatatttcagtgccagcgagcgtgggctttatcgctctttttgggattgcggttttaaatggcgtggtgatgataggctattttaaagagcttctcttgcaagggaaaagcgtagaagaatgcgttttattgggcgctaaaaggcgtttgagaccggttttaatgaccgcttgcattgccggtttgggtttgctccctttattattttctcatagcgtgggatcagaagtccaaaaacctttagcgatcgtggtgcttggaggcttggttacctcaagcgctctaaccttactcctactgccgccaatgtttatgctcatcgctaaaaagattaaaatcgtttgagttaaaggatttcacatgctcgctttagaaatttatattgatatttgtttgaaaga

SEQ ID NO: 188 - protein, 1020 aa, Helicobacter pylori
MMLASIIEFSLRQRVIVIVGAILILFFGTYSFINTPVDAFPDISPTQVKIILKLPGSSPEEMENNIVRPLELELLGLKGQKSLRSVSKYSISDITIDFDDSVDIYLARNIVNERLSSVMKDLPVGVEGGMAPIVTPLSDIFMFTIDGNITEIEKRQLLDFVIRPQLRMISGVADVNSIGGFSRAFVIVPDFNDMARLGVSISDLESAVRVNLRNSGAGRVDRDGETFLVKIQTASLSLEDIGKITVSTNLGHLHIKDFAKVISQSRTRLGFVTKDGVGETTEGLVLSLKDANTKEIITQVYQKLEELKPFLPNGVSINVFYDRSEFTQKAIATVSKTLIEAVVLIIITLFLFLGNLRASVAVGVILPLSLSVAFIFIKFSDLTLNLMSLGGLVIAIGMLIDSAVVVVENAFEKLSANTKTTKLHAIYRSCKEIAVSVVSGVVIIIVFFVPILTLQGLEGKMFRPLAQSIVYALLGTLVLSITIIPVVSSLVLKATPHSETFLTRFLNRIYAPLLEFFVHNPKKVILGAFVFLIASLSLFPFVGKNFMPVLDEGDVVLSVETTPSISLDQSRDLMLNIESAIKKHVKEVKSIVARTGSDELGLDLGGLNQTDTFISFIPKKEWSVKTKDELLEKIMDSLKDFKGINFSFTQPIEMRISEMLTGVRGDLAVKIFGDGISELNELSFQIAQALKGIKGSSEVLTTLNEGVNYLYVTPNKESMADVGITSDEFSKFLKSALEGLVVDVIPTGISRTPVMIRQESDFASSITKIKSLALTSKYGVLVPITSIAKIEEVDGPVSVVRENSMRMSVVRSNVVGRDLKSFVEEAKKVIAQNIKLPPSYYITYGGQFENQQRANKRLSTVIPLSILAIFFILFFTFKSIPLALLILLNIPFAVTGGLIALFAVGEYISVPASVGFIALFGIAVLNGVVMIGYFKELLLQGKSVEECVLLGAKRRLRPVLMTACIAGLGLLPLLFSHSVGSEVQKPLAIVVLGGLVTSSALTLLLLPPMFMLIAKKIKIV

SEQ ID NO: 189 - DNA, 720 bp, Helicobacter pylori
  CDS (33)...(638)
aagcttataaaatcatcaaaaagagtgctgaaatgaatgttttaatcagattgtgctttatttttttgattgggttttttggcgcgaataaaaccctaaacgcaacagccattctttctcttgactttggctctttttccatgccaatcactgccaatttctcagatggtgcgttaaatgtattcaaatggtttgaaaaacacccatcagtgggtgttaaagttggtcggcttgcaaatcaagacgacactatctttactctagttttcattgtgatagttgtcgcaataattgcccttatcgctatttttataaggagtatattactaaacacaatttttgtaggatcgctcataggatccttatggttgtatatggtagggttttattatttttatggtgttccctttttgagttatttgagcggttgttatgaatcgttttctttctccgcatgctatcctcatagtttgcagctactccccacccttatgcagtattcgcccatttactccataatcaaacttcttgctcattttaatatagagatcacttctaagattatcatttctcttgtttgggtgtgtatagggctgtattttttgttattgcaagcgttttttagtcttacaaattattagttgcagaaaattcaagaaggcaaaaaattatcttttttcctcgaatcaatcattaggttattttttggttttatgatag

SEQ ID NO: 190 - protein, 202 aa, Helicobacter pylori
MNVLIRLCFIFLIGFFGANKTLNATAILSLDFGSFSMPITANFSDGALNVFKWFEKHPSVGVKVGRLANQDDTIFTLVFIVIVVAIIALIAIFIRSILLNTIFVGSLIGSLWLYMVGFYYFYGVPFLSYLSGCYESFSFSACYPHSLQLLPTLMQYSPIYSIIKLLAHFNIEITSKIIISLVWVCIGLYFLLLQAFFSLTNY

SEQ ID NO: 191 - DNA, 310 bp, Helicobacter pylori
  CDS (65)...(280)
aattcaagaaggcaaaaaattatcttttttcctcgaatcaatcattaggttattttttggttttatgatagtttcttttattgccgttccatgctactatgttttattggcgatggaataccaaatagcctatgaacacccaggagaattaataagcacgattggttttgttgcgttagcagtgcttgtgtattacttatggggtaaatgggagaagttgctatggggcgcaccttccaatcaagagcaacaactctccaatcaaggcaaccaaaatcaatgattgtgattgatcgctaggtcaatctga

SEQ ID NO: 192 - protein, 72 aa, Helicobacter pylori
MIVSFIAVPCYYVLLAMEYQIAYEHPGELISTIGFVALAVLVYYLWGKWEKLLWGAPSNQEQQLSNQGNQNQ

SEQ ID NO: 193 - DNA, 311 bp, Helicobacter pylori
  CDS (60)...(287)
taggaaaaagactatcatgcgagctatccaaattagatccgatcaaaaactaccctttaatggttgtatcaatgaactgcatcggctctaaatacaaactcattgcctttattcaagaaaatatccatgcggttgtggggcaaccttttgggtgtgattttttgcgatctgttcgctgggacgggtatcgtggggtgtgcgtaaagtggtctctaggttcaacactaaaaaacattttttcattagacagcgtgttaaaagccaatcaagttatccctaaagatgcttaacatgttaaaataatctcatac

SEQ ID NO: 194 - protein, 76 aa, Helicobacter pylori
MVVSMNCIGSKYKLIAFIQENIHAVVGQPFGCDFLRSVRWDGYRGVCVKWSLGSTLKNIFSLDSVLKANQVIPKDA

SEQ ID NO: 195 - DNA, 900 bp, Helicobacter pylori
  CDS (51)...(872)
aaaattaagttgtttgatcgcttttaaacgatttttaaaaggaaaaatttatggatgaaattaaaacgctgttagtggatttttttccgcaggcaaagcattttgggataatcttaatcaaggctattgttgtcttttgtataggtttttatttttcatttttcttacaaaaaaaaaccatgaaatttttatccaaaaaggatgagattttagcgaattttgtcgcacaggttacttttatcttaatccttatcatcaccacaatcattgcgctcagcacgctaggcgtgcaaaccacctctattatcactgttttaggaacggtagggattgctgtggcgttggctttaaaagattatctttcaagcattgctggagggataatccttattatcttgcaccctttcaaaaaaggagacatcattgaaatctctggcctagagggcaaagtagaagcgcttaatttttttaacacttctttacgcttgcatgacggacgcttggcggttttacccaatagaagtgtcgctaattctaatattatcaatagcaataacacggcgtgtcggcgcattgaatgggtttgtggggtagggtatgggagcgatattgaactggtgcataagactataaaagatgttattgatgcaatggaaaaaattgataaaaacatgcccacttttattgggatcacggattttggacaaagttcgctgaatttcaccattagggtttgggcaaagattgaagacggaatctttaatgtgcgcagcgaactcattgaacgcatcaaaaacgccctagacgctaaccacattgaaatccctttcaacaagctagatattgctattaaaaatcaagactctcctaaatgattggtgtgagatgtattgattgtag

SEQ ID NO: 196 - protein, 274 aa, Helicobacter pylori
MDEIKTLLVDFFPQAKHFGIILIKAIVVFCIGFYFSFFLQKKTMKFLSKKDEILANFVAQVTFILILIITTIIALSTLGVQTTSIITVLGTVGIAVALALKDYLSSIAGGIILIILHPFKKGDIIEISGLEGKVEALNFFNTSLRLHDGRLAVLPNRSVANSNIINSNNTACRRIEWVCGVGYGSDIELVHKTIKDVIDAMEKIDKNMPTFIGITDFGQSSLNFTIRVWAKIEDGIFNVRSELIERIKNALDANHIEIPFNKLDIAIKNQDSPK

SEQ ID NO: 197 - DNA, 833 bp, Helicobacter pylori
  CDS (52)...(762)
tagcggttgggtaattcactccaatctctaagtggcagtggctatgaaaacatgcaatcacttgctgggggattgagtggtagagcgtggggagaaatgttgtgtaaaatggtaaacgatagtaattatgaaagcgagcaagctcttttagcaacaggcaatagctcagaagagcaaaaacgaagatttttgcttagagtaaagaaaaaggttaatgataataggcagttaaaaaagaaacttgacccatttctaaaaagacttgatgtcctacaaactgagtttggtgtaactgaccctacagctaaccataataagcaagggatacattattgcacagaaaataaaaagacaggtaaatgcgaccctattgataatgtatttaggacaactcgcttagataacgaattagaacaagaaatccaaacgctcacacttgatttaaccaaagcccccaataaagacgctcaaagccaagcctacgcaaatttcaatcaaaggattaaattacttactctaaaatatttaaaagaaattaccaatcaaatgctctttttaaatcaaacaatggcaatgcaaagcgagattatggcagatgattattttaggcaaaataatgatggctttgggaaagaagaaaaccatatagacaaacaattaacgcaaaaaagaataaacgaaagagaaagagccagaatatactttcaaaaccctaatgttaaatttgaccaatttggttttcccatttttagtatatgggattaagggtttagtgatgagagatagaataagtattttttttccaaactattcctattttagtggtagtgttg

SEQ ID NO: 198 - protein, 237 aa, Helicobacter pylori
MQSLAGGLSGRAWGEMLCKMVNDSNYESEQALLATGNSSEEQKRRFLLRVKKKVNDNRQLKKKLDPFLKRLDVLQTEFGVTDPTANHNKQGIHYCTENKKTGKCDPIDNVFRTTRLDNELEQEIQTLTLDLTKAPNKDAQSQAYANFNQRIKLLTLKYLKEITNQMLFLNQTMAMQSEIMADDYFRQNNDGFGKEENHIDKQLTQKRINERERARIYFQNPNVKFDQFGFPIFSIWD

SEQ ID NO: 199 - DNA, 351 bp, Helicobacter pylori
  CDS (63)...(311)
tcaaaccaaaaccaacacaaaatttgctaaactacaatcaaatcaatttagggaggataaaaatgtcatttgcccctatgttattagctacaatcaataactctattggcaataaagataagcatgtgagtttagagtatcttatagggctttttatggataaaaaaacaactaatctaagcaatactgacaagtatattataggcacaattcaaacagaggcactagagcaagaaatagaatggttttcacaagactatcacattcctatggagaatattttacatgtcctttctatcaatccctatcaatgaaaagagccttagttttatcaaaaacaactttcaagct

SEQ ID NO: 200 - protein, 83 aa, Helicobacter pylori
MSFAPMLLATINNSIGNKDKHVSLEYLIGLFMDKKTTNLSNTDKYIIGTIQTEALEQEIEWFSQDYHIPMENILHVLSINPYQ

SEQ ID NO: 201 - DNA, 1934 bp, Helicobacter pylori
  CDS (67)...(1866)
aaacatagggcaaatctagttggcacaaaaacagctagtcctgtgcttattaaaaacatagggcaaatgaaacgctcccacttagaaaatgccctaaattatgctttagaaaatagcgaaacagcttacaatgaaatgtttttagaatgcgataagcaattcatcttagagagttggctcaatgactttgatttgactaaagattataacgagactatgcacttagttttttctatcaaagataagccagatgaagagacaatgcaagggcttttacattctacttgggagagcttaaaaataagattgcctgaatacaagtttgcccttgtgccacacgctcatcaagaccatgcccatatccattgttttatcaataagactaatcagctcacacgaagaagactgcgttttaaggggcatgaagattgtaaagaattttttaatgaattaagaagtgagtttgcttataggttgaatgaccacttattgagcgaagaatacttgtatgtcaatgagccaaaacttaaagagctagacaatatcaaacaacaattacaagacttggaaaaagaagaaaaagccttagaacaaatcaaatccccacaagatgagtgggacttaaacaaggctttacaaagcgagtatttacaagaactcaaatataaaaacaaagcaaaagccctagacattcaaaataaccacagcacccctttaaaacaaaagatttctgaatttaaaatcgctctgtttaatcacaaagacacaagcgatgatgaaaaagaacagctagatattgacaggatagataagagaaaaccagtaagcgaacacttaaaaaacactaacaaacacgagctatacgaactcttaggcttttatcaaaaagaattagataaaaaacaaaaccattcagcctttaagaattttgctattctcaatggtttagacagagactttgaaagagagactaatggctattctgttttaaagaaaaaagaaatgcttttaaataagcttgaacacctagacaaacgccttttagataaaaactcacacttactattagcccagctaagaaatgaagttaaaaccaagcaaaacatccaatacaacactctaactaatcctattcttttagccaaagccttagaactttctaaagataaacgccccactctcaaaacttttaaaaacgcttattttagtgctagaaaatatcaattcatgctagagagctttaaaactaagcaaaatgaccccacttacaagcttaatgataacacttatgagctagtgagtaagcaactacaagactatcaaaacaccatgcttttattagccaaagagagattactttttttagaacaagatttaaaacaaaaagaagaagagtttgaaagagccaaagaacattatgtgaaatcttcaaaacattatagagaaacttcattgtctccaaaagaaaaacaaggctttctcaaacaaattaaacaattttctaaaatttctaaggatattctctatacttgtaatgagatcataggagctaataggtttttaacccactatgacaacctaaaccttgaaaaagtcctagaacacgctaaagatactaagctagagcaaaaagaaattcaagctatcacaaaagagcctaataacgatgagccttggattgagtttggtaaaaaagaacaagctagagctaaagcacactatcaagctatgctagaaaaagaaaaagctaaagaattagctaaacaacaagctaacaccttgcactctaatgagcttgatgatgaccctaaagctcatgctggattaaaacaaaatgacaacacaaactttaaagggcgtaatagataatgctctcaagcgatgattgcctttaatgttcttaataaagaatataccctttgaaaggggtttat

SEQ ID NO: 202 - protein, 600 aa, Helicobacter pylori
MKRSHLENALNYALENSETAYNEMFLECDKQFILESWLNDFDLTKDYNETMHLVFSIKDKPDEETMQGLLHSTWESLKIRLPEYKFALVPHAHQDHAHIHCFINKTNQLTRRRLRFKGHEDCKEFFNELRSEFAYRLNDHLLSEEYLYVNEPKLKELDNIKQQLQDLEKEEKALEQIKSPQDEWDLNKALQSEYLQELKYKNKAKALDIQNNHSTPLKQKISEFKIALFNHKDTSDDEKEQLDIDRIDKRKPVSEHLKNTNKHELYELLGFYQKELDKKQNHSAFKNFAILNGLDRDFERETNGYSVLKKKEMLLNKLEHLDKRLLDKNSHLLLAQLRNEVKTKQNIQYNTLTNPILLAKALELSKDKRPTLKTFKNAYFSARKYQFMLESFKTKQNDPTYKLNDNTYELVSKQLQDYQNTMLLLAKERLLFLEQDLKQKEEEFERAKEHYVKSSKHYRETSLSPKEKQGFLKQIKQFSKISKDILYTCNEIIGANRFLTHYDNLNLEKVLEHAKDTKLEQKEIQAITKEPNNDEPWIEFGKKEQARAKAHYQAMLEKEKAKELAKQQANTLHSNELDDDPKAHAGLKQNDNTNFKGRNR

SEQ ID NO: 203 - DNA, 884 bp, Helicobacter pylori
  CDS (22)...(840)
ggagaataaaattacaataaaatggcgttagaaaaaagttatagtaaaaactttgaaagcgatgagctttttgattatgagatcatcaagcccaaaaagacgcttaagatacaatacacttatgctaaacgctactataaagaagtagaaaagtttgctaaaaatttaacccaactgacacaagaagaattcatgcgtttaagagagccacaaaaacaagtggtcatcaaaaacataggcaatatgacacgcctgcattcaaaaagagcgatggattatatcgctaaacatggtgagctagtgagagatgaattttttaatgaagttaattataatgacatagcagagcaatggaatgagcaatttgaaaaattattagaaaataagagccgtgttaaaaattgcgctttacatctagtgtttagcattgatgaaaattgtaatgaaaaaaatttaaaagctttggaattaagcgtgtatcaaacactcactaacacgctaggttatgattatccttttataatgaaactccatacacaccaaaacaatccgcatgcgcatgtgattatcaacaaaactaacaaaattaccaataagcaactatgctttaattctaaagacagctgtaaagagttttaccacacactaagagaaacatttaaagattatttatttgctaactcaaaaggcgaattgcaatattctaacacgcctaatatttataaggcgattaaagacatagaaacagagctagatgcactagaaaacaggctagaaacaataagagttttaggcatgaaaactatttttataaagttttgggtagtgcaacttctcaaatagaaagtttgaaaaaaagagaaaatgccctatttgatcattta

SEQ ID NO: 204 - protein, 273 aa, Helicobacter pylori
MALEKSYSKNFESDELFDYEIIKPKKTLKIQYTYAKRYYKEVEKFAKNLTQLTQEEFMRLREPQKQVVIKNIGNMTRLHSKRAMDYIAKHGELVRDEFFNEVNYNDIAEQWNEQFEKLLENKSRVKNCALHLVFSIDENCNEKNLKALELSVYQTLTNTLGYDYPFIMKLHTHQNNPHAHVIINKTNKITNKQLCFNSKDSCKEFYHTLRETFKDYLFANSKGELQYSNTPNIYKAIKDIETELDALENRLETIRVLGMKTIFIKFWVVQLLK

SEQ ID NO: 205 - DNA, 557 bp, Helicobacter pylori
  CDS (49)...(519)
ataaacaaccatgacaaactaacggactttaagcaataccaaacagacatgaaagaattactagggatagaaatagatgaagagctggatactaaacgacttatccctacttattccaaattgtattctttaaaaaaatactctaaaaaatttaaaagattacaaagaaaacaaagccgtagggtgttaaagtctaaacaaaacaaaaccaaattaggaggtaatttttacaaaacccaaaagaaattaaaccaagcctttgacaagtctagtcatcaaaaaacagacagataccataaaatcacaagcgaactttcaaagcaatttgaattgatagtagttgaagatttgcaagtaaaaaacatgactaaaagagctaaactcaaaaatgttaaacaaaagagtgggcttaatcaatctattttaaacgcttcattctatcaaatcatctcttttttagactacaaacaacagcataatggcaaattgttagtgaaagtttcccccacaatatacgagtaaaacttgccattgttgtgggaatatcaaccacaagc

SEQ ID NO: 206 - protein, 157 aa, Helicobacter pylori
MKELLGIEIDEELDTKRLIPTYSKLYSLKKYSKKFKRLQRKQSRRVLKSKQNKTKLGGNFYKTQKKLNQAFDKSSHQKTDRYHKITSELSKQFELIVVEDLQVKNMTKRAKLKNVKQKSGLNQSILNASFYQIISFLDYKQQHNGKLLVKVSPTIYE

SEQ ID NO: 207 - DNA, 889 bp, Helicobacter pylori
  CDS (52)...(843)
attacattctttttgatttctattgaaaaatttaatattaagaggacttttatgaaaaaatcaaatgacaataacgcactcgccagaagtcaaagggagttgtttgtagggattagggattttattgtttttaaatttaagcgtatggttgtttttaacggagtaagggattttacaaaaatgagatttttgtccatagaattagaaaaatgcgaaaatattaaagatttggaaaaattatgtcatacaatttataatcaaggcacaaagcatattttgatgatgcgtgtattgtttttattctttgactatttctgcaagcatttgaaagttaagcgattgagactactcaatgaagaaatgcttgtgaattttttatttgagttagctaaacaaagaaaaattaattcaatggcaaaatatgtgatgtatattaggcaattttttgattacttggataggactaaacattatgaattttattttagtcttaaaaatatagcctttgctaaacacaaggataatttgcctaagcatctaaattcaaaagatttaaaatcttttatatatactcttataaactatagaactagaagcagttatgaaaagagaaataagtgtattttgctcttgattattttgggtggtttgagaaaatctgaggtttttaatttagaattgagaaatattgttttagagaaagagcattatatcttgcttataaaaggcaaaaacaataaagagcgaaaagcgttcattaaaatcgctcaaacagatattgacacactcgcaccgcttatccgtatccttttggaaagtattgctaaaaatcttttatcccactagcgcgaaaaactccgtcctttagggcggagatgtaagcgtttag

SEQ ID NO: 208 - protein, 264 aa, Helicobacter pylori
MKKSNDNNALARSQRELFVGIRDFIVFKFKRMVVFNGVRDFTKMRFLSIELEKCENIKDLEKLCHTIYNQGTKHILMMRVLFLFFDYFCKHLKVKRLRLLNEEMLVNFLFELAKQRKINSMAKYVMYIRQFFDYLDRTKHYEFYFSLKNIAFAKHKDNLPKHLNSKDLKSFIYTLINYRTRSSYEKRNKCILLLIILGGLRKSEVFNLELRNIVLEKEHYILLIKGKNNKERKAFIKIAQTDIDTLAPLIRILLESIAKNLLSH

SEQ ID NO: 209 - DNA, 546 bp, Helicobacter pylori
  CDS (75)...(530)
ttgacagagtggatttttttatttctaacgctattatttatgggcgttctgtcgtggggggatttgcaccgtttatgcgattaaaacctaaggggttaaacaacatttacacagccaccgtgttagcgttcgtcgtaggggctcaagaagcggcaaaacgcatgcaaaaaataggcggtggggcgatcgtgagcttaagttctaccgggaatctagtttatatgcctaattacgccgggcatggcaattccaaaaacgccgtagaaaccatggtcaaatacgctgccgtggatttaggcgaatttaacattagagtgaatgcggttagtggcgggcctattgatacggacgctttgaaagccttccctgattatgtggagattaaagaaaaagtagaagagcaatcgcccctaaaacgcatgggcaatcctaacgatctagccggagcggcttattttttatgcgatgagacccaaagcggttggcttacagggcaaacgatcgttgtagatggcgggactacttttaaataaagatatttcttgc

SEQ ID NO: 210 - protein, 152 aa, Helicobacter pylori
MRLKPKGLNNIYTATVLAFVVGAQEAAKRMQKIGGGAIVSLSSTGNLVYMPNYAGHGNSKNAVETMVKYAAVDLGEFNIRVNAVSGGPIDTDALKAFPDYVEIKEKVEEQSPLKRMGNPNDLAGAAYFLCDETQSGWLTGQTIVVDGGTTFK

SEQ ID NO: 211 - DNA, 644 bp, Helicobacter pylori
  CDS (2)...(616)
aagatatttcttgcaaaacattatccacatccaccaaaacaaagagttgcaattcattaaaaaatgcttgttgggctattttttcgcccctttgtgtggggctattctgttagtgctttttattgtttcaagcggggcaaaatcgtttcaaatttctaatctctttaacaatcaactagcctatatcgttttgttgtctctttttttgtgcgcgcttgggtttattgccggagcgattggtttttataggctttctaaaatcacacgccatctgagtttttttgaaaatttcgctttcagttttttagcggtgattttatgcgctattttaagctatcttgtccctaacgccagtaacgctctttcgctaatcggtaatggcgtttctattttttatttgcacaaactctatagagaattgagcctttacacgcaagaaaggttttttttaagcgggtttaggttgttgctttttagtttcatgctggctcttttagggattttagtgcaagcgttagttatcatttttttaacgaccgctgtggttttaatgtgtgtggcgcttggttttttggcgcgcgcgtttttgaatttttcacaagtctttttgaaagcatgaaagttttaaaactcctgcctaattt

SEQ ID NO: 212 - protein, 205 aa, Helicobacter pylori
RYFLQNIIHIHQNKELQFIKKCLLGYFFAPLCGAILLVLFIVSSGAKSFQISNLFNNQLAYIVLLSLFLCALGFIAGAIGFYRLSKITRHLSFFENFAFSFLAVILCAILSYLVPNASNALSLIGNGVSIFYLHKLYRELSLYTQERFFLSGFRLLLFSFMLALLGILVQALVIIFLTTAVVLMCVALGFLARAFLNFSQVFLKA

SEQ ID NO: 213 - DNA, 630 bp, Helicobacter pylori
  CDS (62)...(598)
gtgtggcgcttggttttttggcgcgcgcgtttttgaatttttcacaagtctttttgaaagcatgaaagttttaaaactcctgcctaattttttaacaattttacgcattgtcttatccttatttttattatttttattgttaaacacgcgcacttattttagttttttaaccccctttcaaaccaatatgatctcttcattggtttttttgtttgccgcgctcacggatttattggacggctacatcgctagaagctataaagccaaatcgcgctttggggaaatctttgatcctttagcggataaaatccttattttgagcgcgtttttagggttagtttatttggatcgtgtgaatgcgtggatcccgtttgtgattttagggcgtgaattttttatttcagggcttagagtcttagccgctaatgagaaaaaggatattcctgtcaatgcgttaggcaagtataaaaccgtttctcaagtcgtggcgattggtgctttattggctgatgtaacttactcttatgcgcttgtggctatagcggtttttttaaccctttattcggggatagattacaccattaaatattataaatcttaatattttaaaagaagtttttagcgttcttt

SEQ ID NO: 214 - protein, 179 aa, Helicobacter pylori
MKVLKLLPNFLTILRIVLSLFLLFLLLNTRTYFSFLTPFQTNMISSLVFLFAALTDLLDGYIARSYKAKSRFGEIFDPLADKILILSAFLGLVYLDRVNAWIPFVILGREFFISGLRVLAANEKKDIPVNALGKYKTVSQVVAIGALLADVTYSYALVAIAVFLTLYSGIDYTIKYYKS

SEQ ID NO: 215 - DNA, 913 bp, Helicobacter pylori
  CDS (19)...(879)
atagaagaagagtgagaaatgcaagattttattaagatttttattcaagaggttgtctctactttagaagggttagtgggtaaggctccaagcgtgggattagaaaaagaaatttctagtagcgacgaatcttttttgaaattaatcagcacgccttatgcaagagttgtgataagcgcgattgaaaaagaagagagctctattgaattactggctccggtagttttagttacctctttaagcgatttgatgctaggaggtgagggagcgagtaaggaagaaatggataatgacgatttagacgcttttaaagaaatggcttctaatatttttggcgcgatcgctacaagcttgaagtctcaagaattgctccctaaactcaatttcaccactataaacgctgaaatcgctaaagagcttcctaaaaaagaagattacgctaaagcgatggtgttttcttttaaaatggaagccatcaaagaaagccaaatcattttattgactacggcggcttttgagggccaatttgaaaaaacgcataaagaagaaaaagaagaaacgacagagggcgttgctgaagaggttaaaacccatgatgcgtctttagaaaacatagaaatccgcaatatcagcatgcttttagacgtgaaattgaacgttaaggtgcgcatcgggcaaaaaaaaatgattttaaaagacgtggtctctatggatatagggagcgtggtagagctggatcaattggtgaatgaccctttggaaattcttgtagatgacaaggtgatcgctaagggcgaagtggtgattgtggatgggaattttggcattcaaatcacggatattggcactaaaaaagaacgcttagaacaattgaaacattaaatctttttatcataaaaaggaaagggatatg

SEQ ID NO: 216 - protein, 287 aa, Helicobacter pylori
MQDFIKIFIQEVVSTLEGLVGKAPSVGLEKEISSSDESFLKLISTPYARVVISAIEKEESSIELLAPVVLVTSLSDLMLGGEGASKEEMDNDDLDAFKEMASNIFGAIATSLKSQELLPKLNFTTINAEIAKELPKKEDYAKAMVFSFKMEAIKESQIILLTTAAFEGQFEKTHKEEKEETTEGVAEEVKTHDASLENIEIRNISMLLDVKLNVKVRIGQKKMILKDVVSMDIGSVVELDQLVNDPLEILVDDKVIAKGEVVIVDGNFGIQITDIGTKKERLEQLKH

SEQ ID NO: 217 - DNA, 1111 bp, Helicobacter pylori
  CDS (13)...(1056)
taaaaaaggagaatgatgcaagtttaccacctttcacacattgatttagacggctatgcatgccagcttgtttcaaaacaattttttaaaaatatccaatgctataacgctaattacgggcgtgaagtctcagcgagaatttatgagattttaaacgcaatcgctcagtctaaagagagtgaattccttattttggttagcgatttgaatctgaatttgaatgaagcagagtatttgcaggataagatccaagaacaccgcttgcaaaataaaaacattcaaatccagcttttagatcaccatatcagcggtaaggaagtggctgagagtttccattggtattttttagacattaaccgttgcgcgactaaaatcgtgtatgaatttttgaaaaagcattacgctattttagagccaaaaaacacaacatggctagagcctttagtggaaatggtcaattctgtggatatttgggacacgcaaggttatggctttgaattaggcaaggtgtgcatgcgcatgattaaccaaagctctgaattgaatcgtttcatgtttgatgatgaaaaccgcaactataaattaaagcttttagaagaagttaaaaactatttgtttttagaaaatgcccctgtagcctatgataacgatttgttcaaactcaaaaaaatcgctttagggggcgaccctgatgcagaaacgatggacaatatctcttcaaacgcgcaaacgcatttgctctctttaaaaaagcatgattgcagcgtttattaccaggataaaaaagggtttttaagttattctatggggggcattagcgtgttggctaacctttttttaacgcaaaatccggattttgatttttatatggatgtgaacgctaaagggaatgtgagcttaagggcgaatgggaattgcgatgtgtgcgaactcagtcaaatgtgttttaatgggggtgggcataggaatgcgagcggaggcaagattgatggttttagggagagtttcaattatagggatattaaagaacaaattgaagaaatcttcaacaacgcttaaaactaagctgtttagaaaaaactaacaaaaactgaaaagagtttaaaagctc

SEQ ID NO: 218 - protein, 348 aa, Helicobacter pylori
MMQVYHLSHIDLDGYACQLVSKQFFKNIQCYNANYGREVSARIYEILNAIAQSKESEFLILVSDLNLNLNEAEYLQDKIQEHRLQNKNIQIQLLDHHISGKEVAESFHWYFLDINRCATKIVYEFLKKHYAILEPKNTTWLEPLVEMVNSVDIWDTQGYGFELGKVCMRMINQSSELNRFMFDDENRNYKLKLLEEVKNYLFLENAPVAYDNDLFKLKKIALGGDPDAETMDNISSNAQTHLLSLKKHDCSVYYQDKKGFLSYSMGGISVLANLFLTQNPDFDFYMDVNAKGNVSLRANGNCDVCELSQMCFNGGGHRNASGGKIDGFRESFNYRDIKEQIEEIFNNA

SEQ ID NO: 219 - DNA, 2070 bp, Helicobacter pylori
  CDS (39)...(2024)
ataaaaaatgcgcttaaaaccatgaaaaaggagatgcgatgcaattagacgaagatttagaattcgctaaaaaaatctttaaccctaacagagcgtttgccaagcaagccaggattaaaaacatgtgcgaatataaagatttagtgcatgaagccaatgaagattatgaacatttttggggcgatttagccaagcagaaactcacatggtttaaaccttttgataaggttttaaacagcgataacgccccttttttcaaatggtttgaaaacggcaaaatcaatgtttcttacaattgcatagacaggcatttaaaagacaaaaaaaataaagtggcgatcatttttgaaggggaaatgggggattataatgtcatcacttacagaaaactccactctgaagtcaataaaacagccaaccttttaaaaaacgaattcaatgtcaaaaaaggcgatagggtcattatctatatgcccatgattgtagaaagcgtttatatgatgctcgcatgcactaggattggagcgatccatagcatcgtttttgctgggtttagccctgaagccttaagggataggatcaacgacgctcaagctaaattagttatcacagcggatgggacttttagaaaaggcaaaccttacatgctcaagccagcccttgacaaggctctagaaaataacgcctgccctagcgtggaaaaagcgctcattgtgatacgaaacgccaaagagattgactatgtgagagggcgcgattttgtctataatgaaatggtcaattaccaatccgacaaatgcgaacctgaaatgatggactctgaagatcctttattcttgctctatacaagcggatcaaccggaaagcctaaaggcgttcaacacagcagtgcggggtatttgttatgggcgcaaatgacgatggagtgggtttttgatattagagataacgataatttttggtgcaccgccgatattggctggatcacagggcacacttatgtggtttatggacctttagcttgtggggcgacgactttgatactagaaggcacgatgtcttatccggattatgggagatggtggaggatgatagaagaataccgtgtggataaattctacacttcccctaccgctataagaatgttgcatgccaaaggtgaaaacgaaccctcaaagtataatttagagtcgctcaaagttttaggaacggtgggagagcccattaaccctacagcatggaaatggttttatgaaaaaatcggcaactcaaaatgcagcatcgtggatacttggtggcagacagaaacaggcgggcacatcatcagccctttaccgggagctacgcctataagggccagttgcgcgactttacctttgcctggaatccatgcggaagttttaaacgaagacggcactaaaacaaagcctggagagcaagggtttttatgcatcactaagccatggccttctatgataagaaacatttggggcgatgaaaaacgatacattgatagctatttttctcagatcaagttgaatggggaatatgtctacctctctggagatggcgctatcgtggatgaaaacggatacattactattattgggcgcacagatgatattgtgaatgtgagtgggcataggattggcacggctgaagtggagagcgctatttccaagcatgaaatggtggctgaatgcgcggtggtgggtatccctgatgcgattaaaggagagggcttgtttgcgtttgtggtgctgtgcgatggggctaaatgcaatcttggcgagagtttagaattgctaaaagaaatgaaccatatcttatccattgagattggaaagatcgcgaaattagacaatgtcatgtatgtgccaggtttgcctaaaaccaggagcgggaaaatcatgagaaggcttttgaaatccatcgccaaaaaagagcctatcactcaagatttaagcacgctagaagatgtgaatgtggttaaagaaataatgagcatcgctcaaatggaggagtaaaatctaaaaaatgctttttagcgttttttagccaaataataag

SEQ ID NO: 220 - protein, 662 aa, Helicobacter pylori [sequence omitted]

SEQ ID NO: 221 - DNA, 725 bp, Helicobacter pylori
  CDS (19)...(669)
tgaatggcttaatgagcaatggataaaaaccaatatcaccgcccccatagagcaagccaaacggcttttaatgaaaggatagtcatgttaaaaacgaatcaaaaaaatgtgcatgcgtttgaaattgaaaagcaagagcctgaagcggtcatagggtttttagaaaaaaaccatgcccttttgcaatattttcttattatttttaaatacgatattgaatcagaagtcaaagccgttttgcgcaaacaccagcttttgtttttagaaacgaatcgcgttttaaacggacgccatatcaaaaccatgcctttaaaagacgaaaccgatcatccaaaacccaatcattctaaaacagaacctaaaacaacgatttatgagcgccatatcaggagtggggaagagatttatagcactaatcaccttatttttttgggtaatatccataatggagccaagattatttcagagggctgtgtgtctgtttatggggtttgcgaaggggcgattgtgtgctttggagagtgtttgatcttaaaagaagtcaagagcgctcaaatcgtttttcaaaacaaaattttgtctctaaaagaggttgaaccgcttttggtaaataaaaatattaaaataatcactaaaaatgacgatatactagacataaaggaagtattatgaaacaaacaaccattaaccactctgtggaattagtagggataggcttgcacaag

SEQ ID NO: 222 - protein, 217 aa, Helicobacter pylori
MDKNQYHRPHRASQTAFNERIVMLKTNQKNVHAFEIEKQEPEAVIGFLEKNHALLQYFLIIFKYDIESEVKAVLRKHQLLFLETNRVLNGRHIKTMPLKDETDHPKPNHSKTEPKTTIYERHIRSGEEIYSTNHLIFLGNIHNGAKIISEGCVSVYGVCEGAIVCFGECLILKEVKSAQIVFQNKILSLKEVEPLLVNKNIKIITKNDDILDIKEVL

SEQ ID NO: 223 - DNA, 1121 bp, Helicobacter pylori
  CDS (64)...(1068)
aaagaaaatctggtattggataaacccaagtctttagaagtgcctttgactaggcccgaaatcatggggctagaagacaagtgccttttatatgaaattaaagctaatgattggagttatgctaattttttcaatggcaataaagcgtctttcaaacaagaagtgtgtgttgatacgataaaaccctcaatcactattttatctcgatccccaagcatcgcttatggggggagcgcgatagtcgtttttgaagctttggataagaatttgtctcaagcgtttgtgcgcgtcaaaaaaaaggattttgaagctttcaggcttttagaattcaaacagcgtaatgtttttatcgctctagtgccttggtcttataaaaataaggattttaaggcgttcattgtcgctaaagataaagcctataactttaataccgcccctttattgttcaagcgaaaaatccatcgtttgagggaaaaagatatagacttaagcgccttaaaagataagattgcaaagcaagaaaaatttcaaaacgacactgaacaagctttattagaaagattttccaatgcgcgcccaaaagatttagaaaaaatccaaaagatcgctttagagcaaggggatttttataaggatttttctcattttcaagcgctaaaacccttgaacgggccttttaaaatggcaagcaattttttagaaaatcggcgtatcttaaagaataatcaggtgttgtttaaattcttgcatttaggggtggatttgatacctggcaaggatttatctttagcgtttgatttgtctgtgaagagggtttttaagggggagttcgatttttatggtaatagtttaatccattgctatgggttaggtttgtgcgtttttttagcccatttaaaagatgataaaagcgtggggagtagtggtttgaaattagggagcgggttgcatttagggatgcttttgcaaggggtttttgtccggcccaatgaatggcttaatgagcaatggataaaaaccaatatcaccgcccccatagagcaagccaaacggcttttaatgaaaggatagtcatgttaaaaacgaatcaaaaaaatgtgcatgcgtttgaaattgaaaag

SEQ ID NO: 224 - protein, 335 aa, Helicobacter pylori
MGLEDKCLLYEIKANDWSYANFFNGNKASFKQEVCVDTIKPSITILSRSPSIAYGGSAIVVFEALDKNLSQAFVRVKKKDFEAFRLLEFKQRNVFIALVPWSYKNKDFKAFIVAKDKAYNFNTAPLLFKRKIHRLREKDIDLSALKDKIAKQEKFQNDTEQALLERFSNARPKDLEKIQKIALEQGDFYKDFSHFQALKPLNGPFKMASNFLENRRILKNNQVLFKFLHLGVDLIPGKDLSLAFDLSVKRVFKGEFDFYGNSLIHCYGLGLCVFLAHLKDDKSVGSSGLKLGSGLHLGMLLQGVFVRPNEWLNEQWIKTNITAPIEQAKRLLMKG

SEQ ID NO: 225 - DNA, 1004 bp, Helicobacter pylori
  CDS (28)...(969)
ttacaactatttattgtaaaggctaaaatgttgaaatttaaatatggtttgatttatatcgcgctcatactaggacttcaagcgacagattatgacaatttagaagaagaaaaccaacaattagatgaaaaaataaaccatttaaagcaacagctcaccgaaaaaggggtttcgcccaaagagatggataaggataagtttgaagaagaatacatcaatcgatcttatcctaaaatttcttccaagaaaaaagagaaattgctcaaatctttttccatagccgatgataagagtggggtttttttagggggtgggtatgcttatggggaacttaacttgtcttatcaaggggaaatgttagacagatacggcgcgaatgcccctagcgcgtttaaaaacaatatcaatattaacgctcctgtttctatgattagcgctaaatttgggtatcaaaaatactttgtgtcttattttgggacacgattttatggggatttattgcttgggggtggggcattaaaagaggatgcaatcaagcagcctgtaggctcgtttatttatgttttaggggctgtcaataccgatttattgtttgatatgcctttagattttaaaactaaaaagcattttttaggcgtttatgcgggttttgggatagggcttatgctctatcaagacaggcctaatcaaaacgggaggaatttagtagtggggggctattcaagccctaattttttatggaaatctttgattgaagtggattacacttttaatgtgggcgtgagtttaacgctttataggaaacaccgtttagagattggcacaaaattgccgattagctatttgagaatgggagtggaagagggagcgatttatcaaaataaagaagatgatgagcgtttgttggtttcggctaacaaccagttcaagcgatccagttttttattagtgaattatgcgtttattttttaaggcttgatcttggagttaaggtttaaaatttt

SEQ ID NO: 226 - protein, 314 aa, Helicobacter pylori
MLKFKYGLIYIALILGLQATDYDNLEEENQQLDEKINHLKQQLTEKGVSPKEMDKDKFEEEYINRSYPKISSKKKEKLLKSFSIADDKSGVFLGGGYAYGELNLSYQGEMLDRYGANAPSAFKNNININAPVSMISAKFGYQKYFVSYFGTRFYGDLLLGGGALKEDAIKQPVGSFIYVLGAVNTDLLFDMPLDFKTKKHFLGVYAGFGIGLMLYQDRPNQNGRNLVVGGYSSPNFLWKSLIEVDYTFNVGVSLTLYRKHRLEIGTKLPISYLRMGVEEGAIYQNKEDDERLLVSANNQFKRSSFLLVNYAFIF

SEQ ID NO: 227 - DNA, 874 bp, Helicobacter pylori
  CDS (18)...(827)
aacacttaggatttttaatgagcatgcaaaccgccccaattaaaaagatcactctcaaccacctccaagctaaaaaaaatcaagaaaaaatcatcgctattaccgcttatgatgcgctgttcgctcaaatatttgatccgctagtggatgtgattttagtgggcgatagtttgaatatgagttttttcaatcaaaacgacactttaagcgcgagtgtggaaatgatgctctatcacaccaaagccgtgtgcgcgggcgctaagactccttttatcatcacagacatgccttttggaagctataaagatgaaaaaacagccctaaaaaacgccattagggtttataaagaaacccaagcgagcgcaatcaaattagagggggggaaagaaaaagcgaaactggttaaaacgctcactaatgagggcgttattgtggtagggcatattggcttgatgccccaattcgtgcgccttgatggaggttataagattaagggcaaaaatgaagaacaacaaaaaaagcttttagaagacgccttgagtttagaagaagctggggtgggtttgttggttttagagggtataaccacccctatcgctcaaaaaatcacgcaaaaaatcaaaatccccacgatcggcatagggagcggtaaagattgcgatgggcagattttagtgtggagcgatatgttaggcttttttgatagctttaagcctaaattcgtgcgagaataccttaaggggaaagaattgattcaaaacgctatcaaacaatacgctgatgatgtgaaaaagggaaacttccctaacgaattagaaagttatcattaatgaaagaacggatagtcaatttagaaactttggattttgaaatt

SEQ ID NO: 228 - protein, 270 aa, Helicobacter pylori
MSMQTAPIKKITLNHLQAKKNQEKIIAITAYDALFAQIFDPLVDVILVGDSLNMSFFNQNDTLSASVEMMLYHTKAVCAGAKTPFIITDMPFGSYKDEKTALKNAIRVYKETQASAIKLEGGKEKAKLVKTLTNEGVIVVGHIGLMPQFVRLDGGYKIKGKNEEQQKKLLEDALSLEEAGVGLLVLEGITTPIAQKITQKIKIPTIGIGSGKDCDGQILVWSDMLGFFDSFKPKFVREYLKGKELIQNAIKQYADDVKKGNFPNELESYH

SEQ ID NO: 229 - DNA, 568 bp, Helicobacter pylori
  CDS (41)...(520)
aataacgataaaattttaaagggtgtaaaagtagattgttatgtttggcatgggcttttttgaaatccttgtggtgttggttgtagcgattatttttttagggccagaaaaattcccccaggctgtcgtggatgtggtgaagttttttcgcgcggttaaaaaaacgctcaatgacgctaaggacactttagataaagaaatcaatattgaagaaatcaaaaaagaaaccctagagtatcaaaagctctttgaaaacaaagtggagagtcttaagggcgttaagattgaagaattagaagacgctaaagtgactgcagaaaatgagattaaaagcattcaggatttgatgcaagattaccaaaaaagcttagaaaccaacacaatccctaaccatttaaacgaagaagtttccaatgaagaagccttaaacaaagaagtttcaagcgatgaatcccctaaagaagtccaattagcaaccgataacaacaccaaagaacacgacaaagaaaaagagaatgtttgaagatttaaaaccgcatttacaggaattaagaaagcgtttgatggt

SEQ ID NO: 230 - protein, 160 aa, Helicobacter pylori
MFGMGFFEILVVLVVAIIFLGPEKFPQAVVDVVKFFRAVKKTLNDAKDTLDKEINIEEIKKETLEYQKLFENKVESLKGVKIEELEDAKVTAENEIKSIQDLMQDYQKSLETNTIPNHLNEEVSNEEALNKEVSSDESPKEVQLATDNNTKEHDKEKENV

SEQ ID NO: 231 - DNA, 359 bp, Helicobacter pylori
  CDS (46)...(324)
taaaggcgagcagttaaaagatgaaatcgcttgtaaagacactgaatgctttatgcatcaaaaacgagtttatttttacaaatcaaaggaaagtttatgttaagaattttaatccccttgctcattattgtgtgggttttatggcgtttgtttttgaggcaaaaaccccctaaagacaaccactcttacacgcaacaaacccctaaagaattagaagatcacatgattgtatgctctaaatgccaaacctatgtctctagcaaagacgctatttatagcggggcggtggcgtattgcagtgaaacctgtttgaaggataagaggtaaatatgcttattttaggacaccctttaatccct

SEQ ID NO: 232 - protein, 93 aa, Helicobacter pylori
MLYASKTSLFLQIKGKFMLRILIPLLIIVWVLWRLFLRQKPPKDNHSYTQQTPKELEDHMIVCSKCQTYVSSKDAIYSGAVAYCSETCLKDKR

SEQ ID NO: 233 - DNA, 814 bp, Helicobacter pylori
  CDS (31)...(765)
taaaaaacaaccaataaattaaggattataatgaaaccaacgaacgaacctaaaaaacctttttttcaaagtcccattatccttgcggttcttggagggattttactcatcttttttctacgctctttcaattctgatggcagtttttcggacaatttcttagcttctagcactaaaaatgtgagctaccatgaaatcaaacagctcatcagcaataatgaagtggaaaatgtgagtatcggtcaaactttgatcaaagccagccataaagagggcaacaatcgtgtgatctatatcgctaaacgggtgcctgatttgaccttagtgcctttgttagacgagaaaaaaatcaattattctggttttagcgagtctaacttttttacggacatgctagggtggctcatgcctattttagtgattttagggctatggatgtttatggcgaaccgcatgcaaaaaaatatgggtgggggtatttttggcatggggagcgcgaaaaaactcattaacgctgaaaaacccaatgtgcgttttaatgacatggcaggcaatgaagaagccaaagaagaagtggtagaaatcgtagatttcttaaaataccctgaacgatacgccaatttaggggctaaaatccctaaaggcgtgttattagtagggcctccaggaaccggtaaaacccttttagccaaagcggtagccggcgaacgcatgtgccgtttttctctatgggagggagcagtttcattgaaatgtttgtgggcttaggggcaagcagggttagggatttatttgaaaccgctaaaaaacaagc

SEQ ID NO: 234 - protein, 245 aa, Helicobacter pylori
MKPTNEPKKPFFQSPIILAVLGGILLIFFLRSFNSDGSFSDNFLASSTKNVSYHEIKQLISNNEVENVSIGQTLIKASHKEGNNRVIYIAKRVPDLTLVPLLDEKKINYSGFSESNFFTDMLGWLMPILVILGLWMFMANRMQKNMGGGIFGMGSAKKLINAEKPNVRFNDMAGNEEAKEEVVEIVDFLKYPERYANLGAKIPKGVLLVGPPGTGKTLLAKAVAGERMCRFSLWEGAVSLKCLWA

SEQ ID NO: 235 - DNA, 1137 bp, Helicobacter pylori
  CDS (59)...(1093)
aagtgtttgtatcggttttagtgatttcttgcccttgcgctttaggattgctacgcctatgagcattttagtagcgaaccagaaagcgagttctttagggttattttttaaagacgctaaaagtttagaaaaagcaaggctagtcaatacgatcgtttttgataaaaccggcacgctcactaacggcaagcctgtcgttaaaagcgttcattctaagatagaattattagagttattgagtttagcgctcagtattgaaaagagtagcgaacatgtcatcgctaaagggattgtagaatacgcaaaagagcataacgctcccttaaaagaaatgagcggggttaaagtgaaaacgggttttggcattagtgctaaaacagattatcaaggcactaaagagattattaaagtaggcaacagcgagttttttaaccctattaacacgctagaaattaaagaaaacgggattttagtgtttgttggtagagcgatcagtgaaaaagaagacgagcttttaggggcgtttgttttagaagatttgcccaaaaaaggcgtgaaagagcatatcgctcaaatcaaaaatttaggcattaacacctttcttttaagcggagacaatagggagaatgtccaaaaatgcgcgtttgaattagggattgatggttatatcagcaacgctaaaccacaagacaagctcaataagatcaaagagcttaaggaaaaagggcagatcgttatgatggtgggcgatggcttgaatgacgctcctagtcttgctatgagcgatgtggcggtggtgatggctaaagggagcgatgtgagcgtgcaagcagcggacattgtgagttttaataacgatattaaatcggtttatagcgcgattaaattaagccaggcgacaattaaaaatatcaaagaaaatttgttttgggctttttgttataatagcgtgttcatccctttagcttgtggggttctttataaggctaatctcatgttaagcccggcgattgcgggtttagcgatgagtttaagctctgtgagtgtggtcttaaactcccaaaggctaaggaattttaaaattaaggatcattgaatgaaagcaacttttcaagtgccaagcattacttgcaacca

SEQ ID NO: 236 - protein, 345 aa, Helicobacter pylori
MSILVANQKASSLGLFFKDAKSLEKARLVNTIVFDKTGTLTNGKPVVKSVHSKIELLELLSLALSIEKSSEHVIAKGIVEYAKEHNAPLKEMSGVKVKTGFGISAKTDYQGTKEIIKVGNSEFFNPINTLEIKENGILVFVGRAISEKEDELLGAFVLEDLPKKGVKEHIAQIKNLGINTFLLSGDNRENVQKCAFELGIDGYISNAKPQDKLNKIKELKEKGQIVMMVGDGLNDAPSLAMSDVAVVMAKGSDVSVQAADIVSFNNDIKSVYSAIKLSQATIKNIKENLFWAFCYNSVFIPLACGVLYKANLMLSPAIAGLAMSLSSVSVVLNSQRLRNFKIKDH

SEQ ID NO: 237 - DNA, 575 bp, Helicobacter pylori
  CDS (25)...(537)
tcaattctatttaaaaggttttttatggatattttaaaaactcttcaaaaacatttgggcgatgttgaaacaagcgattttacaaccaatgcgatagaaaaatcccaacaaatcgctaaattcagtagggacatgaaaaatataaacgagagcgttggagcgttacaagtcttgcaaatcgcttgcaaaaagcttttcaataagagcatgggtttagaagataaagacgctttgcaagcttctatcatcaaacaggaattgcgagaaattgtagaaaattgccagtttttagcctcccctttgtttgacactcagctcaacattgcaatcaatgatgaaattttttccatgattgtggttaatccgttggatttattggaaaatgtgggcgagtttcaagcttatttggaagaaaaattaaacgaaattaaggaattattaggttatttgagtgaaagcctttcaaaccctaaagccttcatgccaagtttttcaaatcaaagccttaaagatttattaagcgataatttgagggcttagaattcagctctctagtttagaaaatttgattttcc

SEQ ID NO: 238 - protein, 171 aa, Helicobacter pylori
MDILKTLQKHLGDVETSDFTTNAIEKSQQIAKFSRDMKNINESVGALQVLQIACKKLFNKSMGLEDKDALQASIIKQELREIVENCQFLASPLFDTQLNIAINDEIFSMIVVNPLDLLENVGEFQAYLEEKLNEIKELLGYLSESLSNPKAFMPSFSNQSLKDLLSDNLRA

SEQ ID NO: 239 - DNA, 1025 bp, Helicobacter pylori
  CDS (49)...(972)
tttttagcgattgtgttcttgcatgcattgggtttagcgttgctctttatggccaataacgcttcgttttatgcggcggcgtctatggcctacatgctaggggcaaagcatgcgtttgatgcggatcacatcgcttgcatagataacaccattagaaagctcacccaacaaggcaaaaacgcctatggtgtggggttttacttttctatggggcattcaagcgtggtgattttaatgaccatcatcagcgcgtttgcgatcgcttgggctaaagaacacacgccgatgctagaagaaatagggggggtagtggggactttagtttctgggctttttttgctcattatagggctattgaatgcgattattctcttggatttattaaaaatattcaaaaaatcgcactctaatgaaagcctaagccagcaacaaaatgaagagatcgagcggctcttaacgagtaggggcttgctcaaccgcttttttaaacccttgtttaattttgtctccaagtcgtggcatatttatcctatcggttttctttttgggctgggttttgataccgctagtgaaatcgcgcttttggccctctctagcagcgcgattaaagtgagtatggtgggcatgctctctttacccattctttttgccgctggcatgagtttgtttgacactttagatggggcgttcatgctcaaggcgtatgactgggcgttcaaaacccctttaagaaaaatctattacaatatctctatcacggccttaagcgtgtttatcgcgctctttattggcttgattgagctttttcaagtcgttagcgagaaactccatttaaaatttgaaaaccgccttttaagagccttacaaagcctggaatttacagacttgggctattacttggtgggcttatttgtaatagcgtttctaggatcgttctttttatggaaaatcaaattttctaaactagagagctgaattctaagccctcaaattatcgcttaataaatctttaaggctttgatttg

SEQ ID NO: 240 - protein, 308 aa, Helicobacter pylori
MANNASFYAAASMAYMLGAKHAFDADHIACIDNTIRKLTQQGKNAYGVGFYFSMGHSSVVILMTIISAFAIAWAKEHTPMLEEIGGVVGTLVSGLFLLIIGLLNAIILLDLLKIFKKSHSNESLSQQQNEEIERLLTSRGLLNRFFKPLFNFVSKSWHIYPIGFLFGLGFDTASEIALLALSSSAIKVSMVGMLSLPILFAAGMSLFDTLDGAFMLKAYDWAFKTPLRKIYYNISITALSVFIALFIGLIELFQVVSEKLHLKFENRLLRALQSLEFTDLGYYLVGLFVIAFLGSFFLWKIKFSKLES

SEQ ID NO: 241 - DNA, 1034 bp, Helicobacter pylori
  CDS (75)...(989)
ttgtgaaagaaaatgaagcgttttttaaaatcggtatcaaaaacatcgccgtggctgaaatttcttcgcctttaatggagtttttaggttcaatcgctatagcgctagtgatttatttaggggggaatgaagtgattagaggccatattagcgtgggggcgtttttttctttcattacggccctttttatgctctatacgccgattaaacgcttaactaggattgtttctaattttcaagaagccttagtcgctagcgacaggatccatgagattttagaaagagagccggctattgttgatggggaattgacgctaaataacgccatacacaccatagaatttaaaaaggtatggctggcttatacgctagacaatcaagagcgttatgttttaaacgatattagtttgaagttccaacaaaatgaaatcatcgctttaaagggcgaaagcgggagcggtaaaagctcattagtgaatctgatcttacgcctttatgagccaagcaaaggcgaaattttcatcaacgatcaaaaaatagagagcatcactcaaaaatccttaagagaaaagattagcgttgtcactcaaagggtgtttatttttaacgggagcgtggctgaaaatgtggcgtatggtttagaaattgatgaggtaaaaatcaaagaatgcctaaaaaaagctcaagccttagattttgttgaaaaaatgcctcatgggatagagagcgttttagatgaatttggcgctaatcttagcggcggccaacgccaaagaatcgccattgcaagagctttgtataaagacgttcaagttttaatctttgatgaagccacttccgctttagacaataacacagaagagagcgttaaacaaagcattttagaattgaaacaaaaccgcttgatcattcttatttcgcacaacccaagcacgctaaaattagccactaagcatgtgaaattagagcatgggcgtttgacagaatgctaagggttttaagcgttggtgttgcttttattttactagggtgtc

SEQ ID NO: 242 - protein, 305 aa, Helicobacter pylori
MEFLGSIAIALVIYLGGNEVIRGHISVGAFFSFITALFMLYTPIKRLTRIVSNFQEALVASDRIHEILEREPAIVDGELTLNNAIHTIEFKKVWLAYTLDNQERYVLNDISLKFQQNEIIALKGESGSGKSSLVNLILRLYEPSKGEIFINDQKIESITQKSLREKISVVTQRVFIFNGSVAENVAYGLEIDEVKIKECLKKAQALDFVEKMPHGIESVLDEFGANLSGGQRQRIAIARALYKDVQVLIFDEATSALDNNTEESVKQSILELKQNRLIILISHNPSTLKLATKHVKLEHGRLTEC

SEQ ID NO: 243 - DNA, 604 bp, Helicobacter pylori
  CDS (99)...(563)
ttttattttcttctttagtggtggctttaagcacggcttgggggacttatttagtcaagcccactttagatgaaatttttatcaataaagacactcacatgctcaaaatcctgccttttttagtgattttggcgtatttgggtaagagtgggggcatgtatttaggcacttatttcaccaacttcattgggcttgatattgtcaaaaaaatacgcaacactatgctagaaagccttcttaaaatggaaatggatttttttaacaggacgaaaaagggcgaattgatcgcaaggatcaccaatgatataggtttgattagagcgagtttgtccaattacctttcagagagcataagagaggggctaacgattgttgggttagtgggggtggtgatctatcaaagccctaaattagcgttagtggggttagtcatcatgccgttagctgctattcctatcagtaaaatcattcgtaaggttaaaaaactcgctaaatcccatcaagagagtaacgccaaaatcaccgctcgtttgagtgaagtttttaacaacgtgggaagcgattaaaatctctaatggcgaaaaattagagcataaggcttttg

SEQ ID NO: 244 - protein, 155 aa, Helicobacter pylori
MLKILPFLVILAYLGKSGGMYLGTYFTNFIGLDIVKKIRNTMLESLLKMEMDFFNRTKKGELIARITNDIGLIRASLSNYLSESIREGLTIVGLVGVVIYQSPKLALVGLVIMPLAAIPISKIIRKVKKLAKSHQESNAKITARLSEVFNNVGSD

SEQ ID NO: 245 - DNA, 789 bp, Helicobacter pylori
  CDS (34)...(738)
tttcgcttatcaagtccccctacctcaattttaatgcgcttagattacgccttattcagtcagcatttagtaaatagcagagaaaaagctaaagcgttggttttaaaaaatcaggttttagtcaataaaatggtggtttccaaaccctcttttatagtgaaagagaacgataaaattgaactcatcgctgaaaaacttttcgttagcagggctggggaaaaattaggggcttttttagaaacccatttcgtggattttaagggaaaggtggttttagatgtgggagcgagcaaagggggctttagtcaagtggctcttttaaaaggggctaaaagagtgctttgcgtggatgtggggaaaatgcaattagatgaaagtttgaaacaagacaagcgcatagaatgttacgaagaatgcgatattagagggtttaaaacgccagaaacaattgatttagcgctttgcgatgtgagctttatttctttatattatattttagaagcgattttgcctttaagcgatgaatttttaacacttttcaaaccgcaatttgaagtgggcagaggaataaaacgcaataaaaaaggggtggtggtggataaagaagccattttgaacgctttagaaaactttaaaaaccatttaaaaacaaaggattttcaaatcttaaagatccaagaaagcttagtgaaagggaaaaacgggaatgttgaattttttatccatttcaagcgagcctaaaattaaaagcctagctatcggtaaatttgacggcttgcatttagggca

SEQ ID NO: 246 - protein, 235 aa, Helicobacter pylori
MRLDYALFSQHLVNSREKAKALVLKNQVLVNKMVVSKPSFIVKENDKIELIAEKLFVSRAGEKLGAFLETHFVDFKGKVVLDVGASKGGFSQVALLKGAKRVLCVDVGKMQLDESLKQDKRIECYEECDIRGFKTPETIDLALCDVSFISLYYILEAILPLSDEFLTLFKPQFEVGRGIKRNKKGVVVDKEAILNALENFKNHLKTKDFQILKIQESLVKGKNGNVEFFIHFKRA

SEQ ID NO: 247 - DNA, 906 bp, Helicobacter pylori
  CDS (19)...(858)
tgaaagggaaaaacgggaatgttgaattttttatccatttcaagcgagcctaaaattaaaagcctagctatcggtaaatttgacggcttgcatttagggcatcaagccctttttaaagagttaaaagatcccaaagcccttttaatcatagaaaaaaaacattacactaaaggctatttaacccccctaaaataccgcgctaaactcgtgggcatgcctttattttttgtgtatttagaagagatttcacaattaaacgccctagattttttagatcttttaaaaaagaaatttccccatttagaacgcctggtcgtgggctatgatttcaggtttgggcatgagaggcaaaatgacgctttatttttaaaagagcgttttgaaaaaaccattattgtgcctgaagtgaaagtccaagagattagcgtgcattctaagatgatcaaactagccctaagtcatggcgacttatctttagctaacaagctcttaggcagaccttatgaagtgtgtggggaagtcattagtgatcaaggtttggggcataaagaattagcacccactttaaatataaaaactaaagattttatcctccctagttttggggtgtatgcgagtttagtgaaaataaaagatccaatttatcaaaaaagcgtgagttttataggcaatcgcttaagcacggatcaaaatttcgccatagaatgccatgtccttgataccatcatagaaaacccgccccaagaaatcgctttgcgttgggttcaaaaaatacgagacaacatgcgtttttcttctttaaaagagcttaaaaatcagatccaacaagacatcttaagagccaaagagattttgagataatttgtgttaaaatgactctcaaaaaccttaaaaatggaaaaattt

SEQ ID NO: 248 - protein, 280 aa, Helicobacter pylori
MLNFLSISSEPKIKSLAIGKFDGLHLGHQALFKELKDPKALLIIEKKHYTKGYLTPLKYRAKLVGMPLFFVYLEEISQLNALDFLDLLKKKFPHLERLVVGYDFRFGHERQNDALFLKERFEKTIIVPEVKVQEISVHSKMIKLALSHGDLSLANKLLGRPYEVCGEVISDQGLGHKELAPTLNIKTKDFILPSFGVYASLVKIKDPIYQKSVSFIGNRLSTDQNFAIECHVLDTIIENPPQEIALRWVQKIRDNMRFSSLKELKNQIQQDILRAKEILR

SEQ ID NO: 249 - DNA, 2627 bp, Helicobacter pylori
  CDS (18)...(2582)
aaagacatgtgcaaccgatgaaatctaaaaaactttatttggctttaatcataggggttttattagcgtttttaaccctatcttcatggctgggtaatagcggtttagtggggcgttttggggtgtggtttgccgcactcaataaaaaatattttgggcatctttcattcattaatttaccctatttagcatgggttttattccttttatacaagactaaaaacccttttacagaaatcgttttagaaaaaactttagggcatctattaggcattttatctttgctctttttacaatctagcctattaaatcaaggggaaatcggcaacagcgcgcgtttgtttttacgcccttttataggggattttgggctttatgcgctgataacgcttatggtagttatttcttatttgattctattcaaactaccccctaaaagcgttttttatccttatatgaacaaaacacaaaaccttttaaaagagatttacaaacaatgcttacaagcctttagccctaattttagcccaaaaaaagagggttttgaaaacaccccatcagatattcaaaaaaaagaaaccaaaaacgacaaagaaaaagaaaaccgcaaagaaaaccctattaatgaaaaccacaaaacccctaacgaagaaccgtttttagcgatccctaccccctataacacgactttaaatgattcagagccgcaagaaggcttagtccaaatttcctcccacccccctacccattacaccatttaccctaaaagaaaccgatttgatgatttgactaaccccactaacccccctttaaaagaaattaaacaagaaactaaagaaagagaacccacgcctacaaaagaaactcttacgcccaccacgcccaaacctatcatgcccacacttgcacccataatagaaaatgacaacaaaacagaaaaccaaaaaacccccaaccaccctaaaaaagaagaaaacccacaagaaaacacgcaagaagaaatgatagaaggaaggatagaagaaatgataaaggaaaatctaaaaaaagaagaaaaagaagtgcaaaacgctccaaactttagcccagtaacccccacaagcgctaaaaaacccgttatggttaaagaattgagcgaaaataaagagatattagacggattggattatggcgaagtgcaaaaacccaaagattatgagcttcccaccacgcaattattgaatgcggtttgtttgaaagacacttctttagacgaaaacgagattgaccaaaaaatccaggatctattgagcaaactgcgcacctttaaaattgatggcgatattatccgcacttattcaggccctattgtaaccacttttgaattccgcccagcccctaacgttaaggtgagtcgtattttaggcttgagcgatgatttagcgatgactttatgcgctgaatccatccgcattcaagcccctattaagggtaaagatgtcgttggcattgaaatccctaacagccaaagccaaattatttatttaagagaaattctagagagcgaattgtttcaaaaatccagctcgcccttaactctagctttaggcaaagacattgtgggtaaccctttcatcacggatttaaaaaagctcccccatttgctcatcgctggcacgacaggaagcggtaagagcgtgggcgtgaatgcgatgattttatccttactttataaaaaccctcccgatcaactcaaattagtgatgatcgatcccaaaatggtagaatttagtatttatgcggatatccctcatttgctcacgcccattatcaccgaccctaaaaaagctattggggctttgcaaagcgtggctaaagaaatggaacgccggtattctttaatgagcgaatacaaggttaaaaccattgattcttataatgaacaagccccaagtaacggcgttgaagcgttcccctatttgattgtggtgattgatgaattagcggatttaatgatgacagggggcaaagaagcggagtttcctatcgctagaatcgctcaaatggggcgcgcgagcggcttacacctcattgtagcgacccaacgcccaagcgtggatgtcgtaaccggcttgattaaaaccaacttgccttcaagggtgagttttagggtaggcactaagattgattctaaagtgattttagacactgatggggcgcaaagcttgttaggaagaggcgatatgctctttacccccccaggagcgaacgggttagtgcgcttgcatgccccctttgccactgaagatgaaatcaaaaaaatcgtggattttattaaagcccaaaaagaagtacaatacgataaagatttcttgctagaagaatcacgcatgcctttagacacccctaattatcaaggcgatgacattttagaaagggctaaagcggtgattttagaaaaaaagatcacttctacgagttttttacaacgccaattaaaaatcggctacaaccaagccgctaccattactgacgaattagaagctcaaggctttttatccccaagaaacgctaaaggcaacagagagattttgcaaaacttttaggctttgttttcattggatattggcaaacattatttttgattt

SEQ ID NO: 250 - protein, 855 aa, Helicobacter pylori
MKSKKLYLALIIGVLLAFLTLSSWLGNSGLVGRFGVWFAALNKKYFGHLSFINLPYLAWVLFLLYKTKNPFTEIVLEKTLGHLLGILSLLFLQSSLLNQGEIGNSARLFLRPFIGDFGLYALITLMVVISYLILFKLPPKSVFYPYMNKTQNLLKEIYKQCLQAFSPNFSPKKEGFENTPSDIQKKETKNDKEKENRKENPINENHKTPNEEPFLAIPTPYNTTLNDSEPQEGLVQISSHPPTHYTIYPKRNRFDDLTNPTNPPLKEIKQETKEREPTPTKETLTPTTPKPIMPTLAPIIENDNKTENQKTPNHPKKEENPQENTQEEMIEGRIEEMIKENLKKEEKEVQNAPNFSPVTPTSAKKPVMVKELSENKEILDGLDYGEVQKPKDYELPTTQLLNAVCLKDTSLDENEIDQKIQDLLSKLRTFKIDGDIIRTYSGPIVTTFEFRPAPNVKVSRILGLSDDLAMTLCAESIRIQAPIKGKDVVGIEIPNSQSQIIYLREILESELFQKSSSPLTLALGKDIVGNPFITDLKKLPHLLIAGTTGSGKSVGVNAMILSLLYKNPPDQLKLVMIDPKMVEFSIYADIPHLLTPIITDPKKAIGALQSVAKEMERRYSLMSEYKVKTIDSYNEQAPSNGVEAFPYLIVVIDELADLMMTGGKEAEFPIARIAQMGRASGLHLIVATQRPSVDVVTGLIKTNLPSRVSFRVGTKIDSKVILDTDGAQSLLGRGDMLFTPPGANGLVRLHAPFATEDEIKKIVDFIKAQKEVQYDKDFLLEESRMPLDTPNYQGDDILERAKAVILEKKITSTSFLQRQLKIGYNQAATITDELEAQGFLSPRNAKGNREILQNF

SEQ ID NO: 251 - DNA, 1136 bp, Helicobacter pylori
  CDS (51)...(1094)
aaccataaaaacgatacaatagcggtattttaataaaacaaggagttttaatgagagttcaatctaaaggttttgctattttttctaaagacgggcatttcaaaccccatgattttagccgccatgctgtaggccctaaagatgtgttgattgacattctttatgcagggatttgtcatagcgatattcatagcgcttatagcgaatggaaagaaggcatttaccctatggttcctgggcatgaaattgctggggccatcaaagaagtgggtaaggaagttaagaaatttaaggttggcgatgtggtgggcgtgggctgttttgtcaattcatgcaaagcgtgtaagccctgtaaagaacaccaagagcaattttgcgccaaagtggtattcacttacgattgtttggattatttccatgacaacgaaccccacatgggcggatactctaataatattgtagtggatgaaaactatgtgattagcgtggataaaaacgctcctttagaaaaagtagcccccttgctttgtgcgggcatcaccacttattcgcccttaaaattttctaaggttactaaaggcacaaaagttggcgtcgctgggtttggcgggctaggaagcatggcggttaaatacgctgtggctatgggggctgaagtgagcgtttttgcaagaaacgaacacaaaaagcaagacgctttgagcatgggggttaaacatttctacactgaccccaaacaatgcaaagaggaattggactttatcatttcaaccattcctacccattatgatttaaaagactacctcaagctcttaacttataatggcgatctagcccttgtgggactcccccctgtagaaatcgctccagcgcttagcgtttttgattttatccatttaggcaatcgcaaggtttatggctcattgattgggggcattaaagaaacccaagaaatgatggatttttctatcaaacacaatatttaccctgaaatagatttgatcttaggcaaggatattgacaccgcttatcataatctaacccatgggaaagcgaaattccgctatgtgattgatatgaaaaaatcgtttgattaaaagttttggctctagctcttttttaagagcttgagttgg

SEQ ID NO: 252 - protein, 348 aa, Helicobacter pylori
MRVQSKGFAIFSKDGHFKPHDFSRHAVGPKDVLIDILYAGICHSDIHSAYSEWKEGIYPMVPGHEIAGAIKEVGKEVKKFKVGDVVGVGCFVNSCKACKPCKEHQEQFCAKVVFTYDCLDYFHDNEPHMGGYSNNIVVDENYVISVDKNAPLEKVAPLLCAGITTYSPLKFSKVTKGTKVGVAGFGGLGSMAVKYAVAMGAEVSVFARNEHKKQDALSMGVKHFYTDPKQCKEELDFIISTIPTHYDLKDYLKLLTYNGDLALVGLPPVEIAPALSVFDFIHLGNRKVYGSLIGGIKETQEMMDFSIKHNIYPEIDLILGKDIDTAYHNLTHGKAKFRYVIDMKKSFD

SEQ ID NO: 253 - DNA, 1378 bp, Helicobacter pylori
  CDS (25)...(1317)
ttaaaaaagggtgtttaattttttatgacttcagcttcaagccattcttttaaagaacaagattttcatattcctatcgcttttgcttttgataagaattacctcattcctgcgggcgcgtgtctttattccttgctagaaagcatcgctaaagccaataaaaaaatccgttacaccctacacgctttagtggtaggcttgaatgaagaagataaagcaaagcttaatcaaatcacagagccttttaaagaatttgccgctttggaagtgagagatattgagtcttttttagacactatccctaacccttttgatgaggatttcactaagcgtttttctaaaatggtgttagtgaagtattttttggcggatttgttccccaaatattccaaaatggtgtggagcgatgtggatgtcatcttttgcaatgaatttagcgctgatttcttaaaccttgaagaaaatgatgagaattatttttatggagttttagaagttgaaaagcaccacatgatggaagggtttttgttttgcaatttagattaccagcgcaagaaaaatttcaccttaagaatgcatgagcttttaagggggaatgaggctaaaggggagttggatttcacgaaatggtgttggcctaacatgaaagctttagggattgaatattgcgttttcccttattattacaccattaaagatttttctaacgcgtatttaaacgagaattacaagaaaaccattttagaggcacgagaaaaccctaccattatccactatgacgcttggtggggagcggtgaagccttgggactatccttttggtttaaaagcggatttatggctgaacgctttggctaaaaccccttttatgagcgattggattgattcgatcgctagggtggaaataggcagcgaaaaatggcatcgttaccacagcatcgttgcctatcactactactttcccctatggaagactgaagagcagatcgcccatgacgcactcaagacctttttagaccattatttttcgtgcatccatgccgcaatcaagcaagaaaatctcggaatgttcttgaaccactacttctcgcatgcccatgcagagatcaaagaaaactcccttgaaatgttcttgaaccactacttctcgcatgtttataggctccctaaaaaagcacggaagagactctttagggtgtttgtcaaacactgcatcctcataccactcaagagccttgtgggtaagactctacgactcttaaaactccatgcgctagctaaaaaaatcctaatccaactcaagctcttaaaaaagagctagagccaaaacttttaatcaaacgattttttcatatcaatcacatagcggaatttcgctt

SEQ ID NO: 254 - protein, 431 aa, Helicobacter pylori
MTSASSHSFKEQDFHIPIAFAFDKNYLIPAGACLYSLLESIAKANKKIRYTLHALVVGLNEEDKAKLNQITEPFKEFAALEVRDIESFLDTIPNPFDEDFTKRFSKMVLVKYFLADLFPKYSKMVWSDVDVIFCNEFSADFLNLEENDENYFYGVLEVEKHHMMEGFLFCNLDYQRKKNFTLRMHELLRGNEAKGELDFTKWCWPNMKALGIEYCVFPYYYTIKDFSNAYLNENYKKTILEARENPTIIHYDAWWGAVKPWDYPFGLKADLWLNALAKTPFMSDWIDSIARVEIGSEKWHRYHSIVAYHYYFPLWKTEEQIAHDALKTFLDHYFSCIHAAIKQENLGMFLNHYFSHAHAEIKENSLEMFLNHYFSHVYRLPKKARKRLFRVFVKHCILIPLKSLVGKTLRLLKLHALAKKILIQLKLLKKS

SEQ ID NO: 255 - DNA, 650 bp, Helicobacter pylori
  CDS (46)...(603)
gctgaattcaatttattttatacgatattaaggagacatattaccatgtttcaaattagatggcatgcacgagcgggtcaaggtgcaatcactggcgctaaagggttggctgatgtgatttcaaaaacaggcaaagaagtgcaagcgttcgcttcttatggttcagctaaaaggggggctgctatgatggcttataaccgcgttgatgatgaacctatcttaaaccatgaacgcttcatgcagcctgattatgtgctggtgattgaccctggtttggttttcattgaaaacatcttcgccaatgaaaaagaagacacgacttatattatcactagctaccttaacaaagaagaattgtttgaaaaaaaacctgaattaaaaacccgtaaggtgtttttagtggattgtttaaaaatctctatggaaaccttaaaacgccccatccctaacacgcccatgttaggggcgttaatgaaagtgtctggcatgcttgaaattggggcttttaaagaagcttttaagaaagttttaggcaaaaaactcacgcaagaagtcattgacgctaacatgctcgctatccaaagagcttatgaagaagttcaataacattaaggaacaaagatgaaagattggaacgaatttgaaatggg

SEQ ID NO: 256 - protein, 186 aa, Helicobacter pylori
MFQIRWHARAGQGAITGAKGLADVISKTGKEVQAFASYGSAKRGAAMMAYNRVDDEPILNHERFMQPDYVLVIDPGLVFIENIFANEKEDTTYIITSYLNKEELFEKKPELKTRKVFLVDCLKISMETLKRPIPNTPMLGALMKVSGMLEIGAFKEAFKKVLGKKLTQEVIDANMLAIQRAYEEVQ

SEQ ID NO: 257 - DNA, 1008 bp, Helicobacter pylori
  CDS (19)...(954)
ttggggattttaacttttatggatttttgctctggcattggtggaggccgtttgggcttggagcaatgccatttaaaatgcgtagggcatgcagaaatcaatcatgaagcccttaggacttatgaattattttttaaagatacccataattttggggatttgatgcgaatcaaccctaatgatttacccgattttgatgcactcattagcgggtttccttgtcaagctttttctatcaatggcaaaaggaaggggcttgaagatgaaagagggacgattatttacgggcttattcgcattttaaaagttaaacagcctgaatgtttcttgcttgaaaatgttaagggcttgatcaatcataataaaaaggcaacttttaatattattatcaaagccctacaagaagtgggttatacaacttattataaaattttaaacagcgctgattttcaattagcccaaaatagagaacgcctttatatcgtagggtttaggaaggatttaaaacacccatttaatttccctttaggtttagccaatgattattatttcaaggattttttagacgctgataatgaatgttatttggatgtgagtaacgctgcatttcaaagatacttgcacaaccgatacaaccataaccgggtttctttagaggatctcttaactttagaaaacgctgttttagacacaagacaatctgatttaaggttgtattctaatgtttttcctactttaaggacttctcggcatggcctgttttatacccaaaaaggcaaaatcaaaagattaaacgctattgaaagcttgcttttgcaaggatttcctagggatttgatcgctaagattaaagataatcctaactttaaagcaagccatttgctatcccaagcggggaatgcgatgagcgtgaatgtgattgctgcaatcgctaaacaaatgttaaaggcgatttaataagggagctttaaggggagaatgatttcaaaataccccctatccccttaa

SEQ ID NO: 258 - protein, 312 aa, Helicobacter pylori
MDFCSGIGGGRLGLEQCHLKCVGHAEINHEALRTYELFFKDTHNFGDLMRINPNDLPDFDALISGFPCQAFSINGKRKGLEDERGTIIYGLIRILKVKQPECFLLENVKGLINHNKKATFNIIIKALQEVGYTTYYKILNSADFQLAQNRERLYIVGFRKDLKHPFNFPLGLANDYYFKDFLDADNECYLDVSNAAFQRYLHNRYNHNRVSLEDLLTLENAVLDTRQSDLRLYSNVFPTLRTSRHGLFYTQKGKIKRLNAIESLLLQGFPRDLIAKIKDNPNFKASHLLSQAGNAMSVNVIAAIAKQMLKAI

SEQ ID NO: 259 - DNA, 1468 bp, Helicobacter pylori
  CDS (30)...(1436)
aaaataaaaattatattaatcaaggagcgatgaaagcgatggaaggtaaaatcattcaggttttaggccctgtggtagatgtggagtttgaatcctatctgccggcgatttttgaagcgttagacattaattttgaagtcaatggtgttcaaaagtctttagttttagaggtggcagcccatttgggcggtaatcgggtgcgagcgattgctatggatatgacagaaggcttagtgcgtaaccaagtgatcaaggctcgcggcaaaatgattgaagtgcctgtgggcgaagaagtattagggcgtatttttaatgttgtgggcgagagcattgacaatttagagccgcttaagccgtccttaacttggcccattcacagaaaagcccctagttttgagcagcaaagcactaaaacagaaatgtttgaaactggtattaaagtcattgacttactcgcgccttattctaagggcggtaaagtaggcttgtttggtggggctggcgtaggcaaaacggtgatcattatggagcttatccataatgtggcttataagcataacgggtattcggtgtttgcaggtgtgggggagcgcaccagagaggggaatgatctgtattttgaaatgaaagaagggggcgttttagacaaagtcgcactgtgttatgggcaaatgaatgagccaccaggcgcgaggaaccgcatcgcattcaccggcttgacgatggcggagtattttcgtgatgaaaagggcttagatgtgttgatgtttattgacaacatctttagatacgctcaaagcggtgcggaaatgagcgcgctattaggccgtatcccttcagcggtggggtatcagcccacgctagccggggaaatggggaaacttcaagagcgtatcgcttccactaaaaatggctctatcacttccgttcaagcggtgtatgtgccagcagatgacttgactgacccagcccctgcttcggtgtttgcgcatttggatgcgactacggtgttgaatagaaagatcgctgaaaaagggatttatccggcggtggatcctttggattccacttcaaggattttaagccctcaaatgatcggtgagaaacactatgaagtcgctaccggtatccagcaggttttacaaaaatacaaggatttgcaagacattattgcgattttgggattagacgaattgagcgaagaggataaaaaaacggttgaaagggccagaaaaattgagaagtttttatcccagccgttctttgtggctgaagtgtttacaggaagtcctggtaaatatgtaacccttcaagagactttagagggctttggagggattttagagggcaaatacgatcatattcccgagaacgcgttttatatggtgggtagcattcaagaggttttagaaaaagctaaaaacatgaaaaattcctaagggttttgtgatggctttgttgaaaatta

SEQ ID NO: 260 - protein, 469 aa, Helicobacter pylori
MKAMEGKIIQVLGPVVDVEFESYLPAIFEALDINFEVNGVQKSLVLEVAAHLGGNRVRAIAMDMTEGLVRNQVIKARGKMIEVPVGEEVLGRIFNVVGESIDNLEPLKPSLTWPIHRKAPSFEQQSTKTEMFETGIKVIDLLAPYSKGGKVGLFGGAGVGKTVIIMELIHNVAYKHNGYSVFAGVGERTREGNDLYFEMKEGGVLDKVALCYGQMNEPPGARNRIAFTGLTMAEYFRDEKGLDVLMFIDNIFRYAQSGAEMSALLGRIPSAVGYQPTLAGEMGKLQERIASTKNGSITSVQAVYVPADDLTDPAPASVFAHLDATTVLNRKIAEKGIYPAVDPLDSTSRILSPQMIGEKHYEVATGIQQVLQKYKDLQDIIAILGLDELSEEDKKTVERARKIEKFLSQPFFVAEVFTGSPGKYVTLQETLEGFGGILEGKYDHIPENAFYMVGSIQEVLEKAKNMKNS

SEQ ID NO: 261 - DNA, 2716 bp, Helicobacter pylori
  CDS (28)...(2649)
taaggaacgctctattttaggataataatgataatgaaacaagaacccaccacctaccaaccagaagagatagaaaaaaagatttatgaaatttgctctcatagggggtattttgaaattgatggcaatgaagcgatccaagaaaaaaacaaacgattttgcttgatgatgccccctcctaatgtgaccggtgtgttgcacatagggcatgccctgactttaagcttgcaagatattttagcgcgttacaaacgcatggatgggtataagactttgtatcagcccgggttggatcacgctggcattgcaacgcaaaatgtcgtggaaaagcagcttttaagtcaagggattaaaaaagaagatttagggcgtgaagagttcattaaaaaagtgtgggaatggaaagaaaagagcgggggagcgattttagagcaaatgaagcgtttaggcgtgagcgcggccttttctaggactcgtttcacgatggataagggcttgcaaagagcggtcaaattggcgtttttgaaatggtatgaaaaaggtctcattattcaagataattacatggtgaattggtgcactaaagatggggcgttgagcgatattgaagtggagtatgaagagcgtaagggggcgttgtattatattagatattatttagaaaatcaaaaagattatttagtggtggctaccacacgccctgaaaccttgtttggcgatagcgcgcttatggtcaatcctaacgatgagagatacaagcatttggtggggcaaaaagcgatcttgcctttaatccatcgcacaatccctattatcgctgatgaacatgttgaaatggagtttggcacagggtgtgtgaaagtaacccctgggcatgattttaacgattatgaagtgggcaaacgccaccatttggaaacgattaaaatctttgatgaaaaggggattttaaacgcgcattgcggggagtttgaaaatttagaacgattagaagctagagataaggtcgtagaaagattaaaagaaaacgccctattggaaaaaatagaagaacacacgcatcaagtggggcattgctatcgttgtcataatgtggtagaaccttatgtgtctaagcaatggtttgtcaagcctgaaatcgctcaaagttctattgaaaaaatccaacaaggtttggcgcgattctacccttctaattggatcaataattacaacgcttggatgagggaattacgcccttggtgtatcagcaggcaattgttttgggggcatcaaataccggtattcacttgcgagaataaccaccagttcgtaagcttagacacccccttaagttgccctacttgtaagagcgaaacactagagcaagataaggatgtgctagacacatggtttagttcagggctatgggcgttttccactctagggtgggggcaagaaaaaagcggtttgtttaatgaaagcgatttgaaagatttctaccctaacacaacgctcattactgggtttgacatcctctttttttgggtggctaggatgcttttttgcagcgaatcgcttttaggcgaattgccctttaaagatatttacttgcacgccttagtgagagatgaaaagggtgaaaaaatgagcaaatctaagggtaatgtgatcgatcctttagagatgatagaaaaatacggcgcggatagcttgcgtttcactttagccaatttgtgcgctacgggtagggacattaagctttccactacgcatttagaaaataacaagaatttcgccaacaagctttttaatgcggcgagttacttgaagctcaaacaagaatctttcaaagataaagagcgtttgaatgaataccaaacgcctttggggcgttatgcgaaatcgcgcttgaattcagcgactaaagaggcgcgtaacgctttagataattatcgttttaatgacgccacgactttgttataccgctttttgtggggggaattttgcgactggttcattgaattttctaaagtggaaaatgaagcgatagacgaattagggagcgtgttaaaagaggctttaaaactcttgcaccctttcatgccctttatcagcgagtctttataccacaagctcagcaatacggaactagaaaacactgaatctatcatggtcatgccttaccctaaagatttggcgcaagatgaaaaattagagcatgaatttgaagtgattaaagattgcattgtgtctttaaggcgtttaaaaatcatgctagaaaccccaccgattgttctaaaagaagcgagcgtgggattaagagaagccatagaaaacacagagcgtttgcaaacttacgcccaaaaattagcgaggttggaaaaagtcagcgtgattagttctaagcctttaaaaagcgtgagcgatgtgggggaattttgccagacttatgcgaatttagaaaatcttgatttaagcccgcttgttgcgcgtttgaaaaagcagttggaaaaattggaaaaagaaaaattaaaactcaatttgcacaatgaaaattttgtcaaaaacgcgcctaaaagcgtgctagaaaaagctaaagagagtttaaaaacgcttttagaaaaagaaagtaaaattaagcaagaattggacttgttagaacaaccataataaaaggatagaaaatgtttcaagcgttaagcgatgggtttaaaaacgcgctcaataaaatccg

SEQ ID NO: 262 - protein, 874 aa, Helicobacter pylori
MIMKQEPTTYQPEEIEKKIYEICSHRGYFEIDGNEAIQEKNKRFCLMMPPPNVTGVLHIGHALTLSLQDILARYKRMDGYKTLYQPGLDHAGIATQNVVEKQLLSQGIKKEDLGREEFIKKVWEWKEKSGGAILEQMKRLGVSAAFSRTRFTMDKGLQRAVKLAFLKWYEKGLIIQDNYMVNWCTKDGALSDIEVEYEERKGALYYIRYYLENQKDYLVVATTRPETLFGDSALMVNPNDERYKHLVGQKAILPLIHRTIPIIADEHVEMEFGTGCVKVTPGHDFNDYEVGKRHHLETIKIFDEKGILNAHCGEFENLERLEARDKVVERLKENALLEKIEEHTHQVGHCYRCHNVVEPYVSKQWFVKPEIAQSSIEKIQQGLARFYPSNWINNYNAWMRELRPWCISRQLFWGHQIPVFTCENNHQFVSLDTPLSCPTCKSETLEQDKDVLDTWFSSGLWAFSTLGWGQEKSGLFNESDLKDFYPNTTLITGFDILFFWVARMLFCSESLLGELPFKDIYLHALVRDEKGEKMSKSKGNVIDPLEMIEKYGADSLRFTLANLCATGRDIKLSTTHLENNKNFANKLFNAASYLKLKQESFKDKERLNEYQTPLGRYAKSRLNSATKEARNALDNYRFNDATTLLYRFLWGEFCDWFIEFSKVENEAIDELGSVLKEALKLLHPFMPFISESLYHKLSNTELENTESIMVMPYPKDLAQDEKLEHEFEVIKDCIVSLRRLKIMLETPPIVLKEASVGLREAIENTERLQTYAQKLARLEKVSVISSKPLKSVSDVGEFCQTYANLENLDLSPLVARLKKQLEKLEKEKLKLNLHNENFVKNAPKSVLEKAKESLKTLLEKESKIKQELDLLEQP

SEQ ID NO: 263 - DNA, 509 bp, Helicobacter pylori
  CDS (32)...(451)
gggcttttttaaacttcttcttatatctttaatgctagaaatagacaaccaaaccccgctagaatcagactttttattattagaaaaaatcgcaaatgttttagcccccactcaaatcattgagcttgttttggtgagcgatgaaaccattcgagaaatcaacaaggatttaaggggttgcgattacgctaccgatgttttgagcttccctttagaagccattcctcacacccctttagggagcgtggtgattaatgcgccattagctcaaactaacgctctgaaattaggacatagcttagaaaatgagatcgctcttttattcattcatggggtgttgcatttgttgggctatgaccatgaaaaagataagggcgaacaacgccaaaaagagagcgaactcattaaagcgtttaacttgcctttgagtttgattgaacgcacacaggattaggtttagatactctactaatgctgacaaataaagcttttaatttttaagaatggaa

SEQ ID NO: 264 - protein, 140 aa, Helicobacter pylori
MLEIDNQTPLESDFLLLEKIANVLAPTQIIELVLVSDETIREINKDLRGCDYATDVLSFPLEAIPHTPLGSVVINAPLAQTNALKLGHSLENEIALLFIHGVLHLLGYDHEKDKGEQRQKESELIKAFNLPLSLIERTQD

SEQ ID NO: 265 - DNA, 1038 bp, Helicobacter pylori
  CDS (25)...(996)
aaaattaaaataaaaaggatagaaatgaatcaagaaattttagacgtgttgatagtgggtgcagggcctgggggcattgccacggccgtagaatgcgaaatagccggcgttaaaaaagtgcttttatgcgaaaaaaccgaaagccattcaggcatgttagagaagttttataaagccggtaaaaggattgataaagattataaaaagcaagtcgtagagcttaaagggcatatcccttttaaagacagctttaaagaagaaactttagagaatttcactaaccttttaaaagagcatcacatcacgccaagctataaaaccgatattgagagcgtgaaaaaagagggcgaatactttaaaatcaccaccacttctaacacaacctatcatgctaaattcgtggtggttgcgatcgggaaaatgggccagccaaaccgccctactgcttataaaatccctgttgcgctctctaaacaagtggtttttagcatcaatgattgtaaggaaaatgaaaaaacccttgtgatcggcggaggcaactcagcggtggaatacgccattgctttgtgcaaaaccacccctaccaccctcaattaccgcaaaaaagaattcagccgcatcaatgaagacaacgctaaaaacttgcaagaagtcctaaacaataacacgcttaaaagcaagcttggagtggatattgaaagcctagaagaagataacactcagattaaggttaacttcaccgataacacgagcgaaagttttgatcgtttgctgtatgcgatcggcggctctacccctttagagttttttaaacgctgttctttagagctggatcctagcaccaatatccctgtggtgaaagaaaatttagagagcaacaatatccctaatttgttcatcgtgggcgatattttattcaaatcaggggcgagcatcgctaccgctttaaaccatggctatgatgttgctatagaaatcgctaaaaggttgcactcttaaagccgctcactcatcaaacggcttagccttatacaaaaa

SEQ ID NO: 266 - protein, 324 aa, Helicobacter pylori
MNQEILDVLIVGAGPGGIATAVECEIAGVKKVLLCEKTESHSGMLEKFYKAGKRIDKDYKKQVVELKGHIPFKDSFKEETLENFTNLLKEHHITPSYKTDIESVKKEGEYFKITTTSNTTYHAKFVVVAIGKMGQPNRPTAYKIPVALSKQVVFSINDCKENEKTLVIGGGNSAVEYAIALCKTTPTTLNYRKKEFSRINEDNAKNLQEVLNNNTLKSKLGVDIESLEEDNTQIKVNFTDNTSESFDRLLYAIGGSTPLEFFKRCSLELDPSTNIPVVKENLESNNIPNLFIVGDILFKSGASIATALNHGYDVAIEIAKRLHS

SEQ ID NO: 267 - DNA, 704 bp, Helicobacter pylori
  CDS (20)...(670)
atttttaaggtatagcgttatggcattagattgggattttatgtttcactccatccctgcgttttttaaggggttagaactcacgctttatatttctttctttgggattttgctctctcttttggtggggtttttgtgcgcgatcgttttgtattttaaaacgcgctttctctctcctgttgtctatatctatggcgaaatcgctaggaacacgcccctgctcatccagcttttctttttgtattacgggttgaatgaaatcggtttgagcgctttagagtgcgcgattttagcgttagggtttttgggtggggggtatatgagtcaaagttttttgcttgggtttaagagcctagcttccattcaaagagaaagcgctttgagtttggggtttagccctttgaaaatgatgtattatattattctgcctcaaagtttaagcgtttctatgccttccataggggcgaatgtgatttttttactcaaagaaacttcggtggtgggcgcgatagccctaaccgatattatgtttgtggcgaaagattttattggcatttattataaaacgactgaaagccttttgatgttaagcctcacttatttgatcgctttactccctttaagcgttttgtttgtgatcttagagcgtttctttaaaaagaaagtggcttaaaatgggagttttactagaattagacaacctt

SEQ ID NO: 268 - protein, 217 aa, Helicobacter pylori
MALDWDFMFHSIPAFFKGLELTLYISFFGILLSLLVGFLCAIVLYFKTRFLSPVVYIYGEIARNTPLLIQLFFLYYGLNEIGLSALECAILALGFLGGGYMSQSFLLGFKSLASIQRESALSLGFSPLKMMYYIILPQSLSVSMPSIGANVIFLLKETSVVGAIALTDIMFVAKDFIGIYYKTTESLLMLSLTYLIALLPLSVLFVILERFFKKKVA

SEQ ID NO: 269 - DNA, 737 bp, Helicobacter pylori
  CDS (31)...(699)
agcgtttctttaaaaagaaagtggcttaaaatgggagttttactagaattagacaaccttaagcgtttgttagaagggtttgaaaccactcttttgatcgctcttagctctgcaatgatttcaatcattgttggaatgcttttggggagcttgatggcgtttggttctcaaatagtggttttggcgtgtcgtgtgtatttagaaagcattcgcatcatcccgcttttagcatggctttttattgtgtatttcgggttagcgagctggtttgatttgcatattagcgcggttttggcaagcgttattgtttttagcttgtggggtggcgctgaaatgatggatttaactaggggggttttaacttccgtgagcaaacaccaaatagaaagcgctctggctttaggcttagattcaaaaaaggtgatttttaatattattttccctcaaagctttttgtctttattgccctcaagccttaatttgttcacgcgcatgatcaaaaccacggctttagtttctctcattggagcgattgatttgctaaaagtgggccagcaaatcatagagcttaacctcttacgcatgcctaatgcgagctttgtggtttatggcgttatcttaatgttttattttagtttatgctatagtttgagcctgtatagttcctatttagaaaaaaaattccaacacattagagggtaaaatgagcgtgattttagaaaccaaagggttaaaaa

SEQ ID NO: 270 - protein, 223 aa, Helicobacter pylori
MGVLLELDNLKRLLEGFETTLLIALSSAMISIIVGMLLGSLMAFGSQIVVLACRVYLESIRIIPLLAWLFIVYFGLASWFDLHISAVLASVIVFSLWGGAEMMDLTRGVLTSVSKHQIESALALGLDSKKVIFNIIFPQSFLSLLPSSLNLFTRMIKTTALVSLIGAIDLLKVGQQIIELNLLRMPNASFVVYGVILMFYFSLCYSLSLYSSYLEKKFQHIRG

SEQ ID NO: 271 - DNA, 807 bp, Helicobacter pylori
  CDS (31)...(774)
aaaaaaaattccaacacattagagggtaaaatgagcgtgattttagaaaccaaagggttaaaaaaaacctatcaaaaccatttggttttagacggcatcaatttcactttaaataagggtgaagtggcagtgattttagggcctagcgggtgcgggaaaagcacttttttaaaatgcctaaacgggcttgaaaagattaatgaaggtgaaatcctttttgaaaacactaaccttaacaataaggccactaactggaatcaaatgcgccaaaaaataggcatggtgtttcaaaattatgaattgttcccgcatttaaatgtgttagataatatcttactcgctcctatgaaagtgcaaaaacgatccaaagatgaggttatttctcaagccatagagcttttaaagcgagtgggtttggagcataaacaacaagcttaccctaaagaattgagcggcggacaaaaacaacgagtagcgatcgtgcgctctttatgcatgcgaccaaaaatcatgctttttgatgaagtaaccgcctctttagaccctgaaatggttaaagaagttttagaagtgattttagaattagccacaacaggcatgagcatggtgattgtaacgcatgaaatgaaattcgcgcaaaaaatcgctcataaaatcgtgttttttgatagcggtaaaatcgctgaagaaaacaacgctaaagaattttttaaccacccgaaatctcaaagagcgcaaaaatttttagaaactttccattttttagggagctgttaaataaagtttgctaaaaagatgattctaatt

SEQ ID NO: 272 - protein, 248 aa, Helicobacter pylori
MSVILETKGLKKTYQNHLVLDGINFTLNKGEVAVILGPSGCGKSTFLKCLNGLEKINEGEILFENTNLNNKATNWNQMRQKIGMVFQNYELFPHLNVLDNILLAPMKVQKRSKDEVISQAIELLKRVGLEHKQQAYPKELSGGQKQRVAIVRSLCMRPKIMLFDEVTASLDPEMVKEVLEVILELATTGMSMVIVTHEMKFAQKIAHKIVFFDSGKIAEENNAKEFFNHPKSQRAQKFLETFHFLGSC

SEQ ID NO: 273 - DNA, 589 bp, Helicobacter pylori
  CDS (13)...(561)
aaggatttgttgatgagttatttttataagcactgtttgaaattttcgttggttgggttgctagggcttttgagcgttcagcttgacgctaggagttttgttgatggggatttagacattcagaaattcagctatgaagattctctacttaaaaagggagaccctaatggcgtgcataaagtgcaggtgcgagattataaaggcaaaatgcaagaagctgagatccactcagaaatacgcattgcgcttaaaccgggggttaaaaaagaagttaaaaaaggcaagatttatagcgctcaaatcaatgatggcatgtgctatgcttttagaatgctccaaaccggcgataataccacaggccttgattctaaagagttccccaagcaaagtcgtgagaaaaagggccgagtgatcactttaatcggtaaaggtgaagtgccttatcttattttagaaaccgattgccaagtgggtgatattgcaaagatctctttggtgggtaattttgatggcactgggtttcttacggaatataaattcaaagacgctaaacccatttactagtctttattcttcgcttcattcttaa

SEQ ID NO: 274 - protein, 183 aa, Helicobacter pylori
MSYFYKHCLKFSLVGLLGLLSVQLDARSFVDGDLDIQKFSYEDSLLKKGDPNGVHKVQVRDYKGKMQEAEIHSEIRIALKPGVKKEVKKGKIYSAQINDGMCYAFRMLQTGDNTTGLDSKEFPKQSREKKGRVITLIGKGEVPYLILETDCQVGDIAKISLVGNFDGTGFLTEYKFKDAKPIY

SEQ ID NO: 275 - DNA, 925 bp, Helicobacter pylori
  CDS (30)...(875)
ggaatttttgggtgctactcctttctcgtatgggtatcgcttttgcccactctattttttggtccatcacggcttctttagtcattcgtgtcgcgccaagaaataaaaaacaacaggccttagggctgttagcgttagggagttcgttagcgatgattttagggttgccgcttgggaggatcattgggcaaattctagattggcgttccacttttggcgtgatcgggggcgttgcgacccttatagcgttgcttatgtggaaattgctcccgcatctacccagtagaaacgcaggcacgctcgcaagtgtccctgtattaatgaaacggccgcttttaatggggatttatttgcttgtgatcatggtcatctctgggcatttcaccacttatagttatattgagccttttatcattcaaatcagccaattttctcctgacattacaacgctaatgttgtttgtgtttgggttagcgggcgtggtggggagttttttgttcggccgtttgtatgcaaaaaattcaagaaaatttatcgcttttgcgatggttttagtcatttgcccgcaactcttgctttttgtgtttaaaaacttagagtgggtggttttcttgcaaattttcttatgggggattgggatcacttcgcttgggatttccttgcaaatgagggtgttgcagcttgcgccggatgccacggatgttgcgagtgcgatttactcagggagctataatgtggggattggatcaggagcgctgtttggcagtattgtgatccaccaactagggctaggatatattggctttgtgggtggggctttaggtttgttggcgctcttttggcttagattcattacgataaagtttaaaaaaacataaagagcgttaaaaggattagcccaataaaggagaatccctttcgcact

SEQ ID NO: 276 - protein, 282 aa, Helicobacter pylori
MGIAFAHSIFWSITASLVIRVAPRNKKQQALGLLALGSSLAMILGLPLGRIIGQILDWRSTFGVIGGVATLIALLMWKLLPHLPSRNAGTLASVPVLMKRPLLMGIYLLVIMVISGHFTTYSYIEPFIIQISQFSPDITTLMLFVFGLAGVVGSFLFGRLYAKNSRKFIAFAMVLVICPQLLLFVFKNLEWVVFLQIFLWGIGITSLGISLQMRVLQLAPDATDVASAIYSGSYNVGIGSGALFGSIVIHQLGLGYIGFVGGALGLLALFWLRFITIKFKKT

SEQ ID NO: 277 - DNA, 1097 bp, Helicobacter pylori
  CDS (28)...(1065)
aagcccttgaaatcattggagaaaacgatgaagacttataatgtcgctattgttggggccagtggggcggtaggccaagagctgattaagggtttagaaaattcttttttcccaattaaaaaatttgtcccgctcgctagcactaggagtgctggtaaaaagatcaaagctttcaataaagactatgaaattttagaaaccacgcatgaagtttttgaaagagaaaaaatagacatcgccttttttagcgctggggggagcgtgagcgmagaatttgctacaagcgcttcaaaaacggccttagtggttgataacacgagcttttttagattgaataaagatgtgcctttagtcgttcctgaaatcaacgctaaagaaatttttaacgctcccttgaatatcatcgctaaccctaattgctccaccattcaaatgacgcaaatcttaaaccccttacatctccattttaagataaaaagcgtgattgttagcacctatcaagccgtgagtggggcagggaacaagggcatagagagtttaaaaaatgagttaaaaaccgctttagagtgtttggaaaaagaccccactattgatttaaaccaagtcttgcaagctggggctttcgcttatccgatcgctttcaatgcgatcgctcatattgatacttttaaggagaatggttacacgaaagaagagctaaaaatgctgcatgaaacccataaaatcatgggcgtggatttccctatcagcgcgacttgcgtgcgcgtgccggtattgaggagccatagcgagagtttgagtatcgcttttgaaaaagaattcgatctcaaagaagtctatgaagttttaaaaaacgcccctagcgtggctgtttgcgatgatcccagtcataatctttaccccacgcccctaaaagcgagccacacggatagcgtctttatagggcgcttgaggaaggatttgtttgataagaaaactttgcatggcttttgtgtggcggatcaattgagagtgggggcagccaccaacgcactcaaaatcgctctgcattacattaagaacgcttgagtttattcaaagataacaaagatgaatgt

SEQ ID NO: 278 - protein, 346 aa, Helicobacter pylori
  VARIANT 81: Xaa = Any Amino Acid
MKTYNVAIVGASGAVGQELIKGLENSFFPIKKFVPLASTRSAGKKIKAFNKDYEILETTHEVFEREKIDIAFFSAGGSVSXEFATSASKTALVVDNTSFFRLNKDVPLVVPEINAKEIFNAPLNIIANPNCSTIQMTQILNPLHLHFKIKSVIVSTYQAVSGAGNKGIESLKNELKTALECLEKDPTIDLNQVLQAGAFAYPIAFNAIAHIDTFKENGYTKEELKMLHETHKIMGVDFPISATCVRVPVLRSHSESLSIAFEKEFDLKEVYEVLKNAPSVAVCDDPSHNLYPTPLKASHTDSVFIGRLRKDLFDKKTLHGFCVADQLRVGAATNALKIALHYIKNA

SEQ ID NO: 279 - DNA, 1395 bp, Helicobacter pylori
  CDS (34)...(1359)
taaaattttagcatacaaatacaaggaaatggaatgattacccctaaagtgttgagcgggtttaaagaccgcttgcctaaagatgcgatacaaaaagcccagttgcttgcgaaagtttcagtcgtgtttcaaagttttggttttgtgccgattgaaacccctcatttggaatacgctcaaacgttattgcctgatgcgagcagtgatattcaaaaagaaatttatcgttttaaagaccatggggatagagatgtggctttaaggtttgatttgactgtgccattagcccgctttgtctctttgcaccaccaaacgctaggcatgccctttaaacgctacgctataggcaatgtctttaggggcgaaagggcgcaaaaagggcgttatagggaatttacgcaatgcgattttgattttatagggagcgagagtttggtgtgcgatgctgagatcattcaagtgattgtcgcttctttaaaagccctagatttagaagatttttgcgtctctatcaaccacagaaaaattttgaacgggatatgcgaatattttgggatctctcaagtgaatgaagcgttgcgcattgtggataaattggaaaaaattggcttgaatggggttgaagaagaattaaaaaaagagtgcggtttaaattcaaacaccattaaagagcttttagaattaattcaaatcaaacaaaacgatttaagccatgcggaattttttgaaaaaattgcttatttgaaagactataatgaaaatctaaaaaaaggcatacaggatttagaaaggctataccagttgctaggggatttgcaaatttctcaaaacctgtataaaattgatttttctatcgctaggggattagggtattatacagggattgtgtatgaaaccacgcttaatgaaatgaagtctttagggagcgtgtgttcaggggggcgttatgatcatttgactaaaaatttttctaaagagaatttacaaggggtaggggcttctattgggattgatcgattgattgtggctttgagtgaaatgcaattattagacgagcgctccacccaagccaaagttttaatcgcttgcatgcatgaagagtatttttcttacgccaaccgcttagcggagtctttaaggcaaagcgggatttttagtgaagtctatccagaagctcaaaaaatcaaaaaacccttttcttatgccaaccataaagggcatgagtttgtggctgtcattggcgaagaagaatttaaaagcgaaactttaagcttgaaaaacatgcattcaggcatgcagttgaattgcttgagttttttaaaagcccttgaaatcattggagaaaacgatgaagacttataatgtcgctattgttggggccagtggggcggtagg

SEQ ID NO: 280 - protein, 442 aa, Helicobacter pylori
MITPKVLSGFKDRLPKDAIQKAQLLAKVSVVFQSFGFVPIETPHLEYAQTLLPDASSDIQKEIYRFKDHGDRDVALRFDLTVPLARFVSLHHQTLGMPFKRYAIGNVFRGERAQKGRYREFTQCDFDFIGSESLVCDAEIIQVIVASLKALDLEDFCVSINHRKILNGICEYFGISQVNEALRIVDKLEKIGLNGVEEELKKECGLNSNTIKELLELIQIKQNDLSHAEFFEKIAYLKDYNENLKKGIQDLERLYQLLGDLQISQNLYKIDFSIARGLGYYTGIVYETTLNEMKSLGSVCSGGRYDHLTKNFSKENLQGVGASIGIDRLIVALSEMQLLDERSTQAKVLIACMHEEYFSYANRLAESLRQSGIFSEVYPEAQKIKKPFSYANHKGHEFVAVIGEEEFKSETLSLKNMHSGMQLNCLSFLKALEIIGENDEDL

SEQ ID NO: 281 - DNA, 639 bp, Helicobacter pylori
  CDS (70)...(597)
cacgcccataggagaagtggcagaagttatgcagctcttattaaagaaggaaaaattaaagcttgggggatgagtgaggcagggttatctagcatccaaaaagcccatcaaatttgccctttaagcgcgttgcagagcgaatattccttgtggtggcgcgaacctgaaaaagagattttaggttttttagaaaaagaaaaaattggatttgtcgctttttcgcctttgggtaaggggtttttaggcgcgaaatttgaaaaaaatgccactttcgctagtgaggattttagaagcgtttctcctaggtttaatcaagaaaatctagccaaaaattacgccttggtggaattaatccaagatcatgcacacgctaaaggcgttacaccagcccaactggctctctcatggattttgcacacgcaaaaaatcattgtccctctctttggcaccaccaaagaatctaggctcatagaaaatataggggctttgcaggtttcttggagtcaaaaagaattggagattttccaaaaagaattgactgcaatcaaaatagaaggggcccgctaccctgaaagaatcaatgaaatggtgaatcaataaaagtattgggtatttataattgcattggctcttttaaaa

SEQ ID NO: 282 - protein, 176 aa, Helicobacter pylori
MSEAGLSSIQKAHQICPLSALQSEYSLWWREPEKEILGFLEKEKIGFVAFSPLGKGFLGAKFEKNATFASEDFRSVSPRFNQENLAKNYALVELIQDHAHAKGVTPAQLALSWILHTQKIIVPLFGTTKESRLIENIGALQVSWSQKELEIFQKELTAIKIEGARYPERINEMVNQ

SEQ ID NO: 283 - DNA, 2133 bp, Helicobacter pylori
  CDS (25)...(2088)
taatttaaaaaaggaacattaaatatggattttatcaccatcaattctagtaacaaaaccgaagagttcgctctcaaacaagtggccaaacaagccaccagctctcttttataccgattaggaaaaaccattattttagcgagcgtgtgcgtggaaagagagcctgtgagtgaagattttctgcctttagtggtgcagtttttagaaaaatcttatgcagccggaaagatcccgggcggttttgttaaaagagaaggcagggcgcaagattttgaaatcttaacctctaggctcatagacaggactttacgccctttattccctaaagactaccgctaccctacacagatcactttaatggttttaagccatgatattgaaaatgacttgcaggtttctgctttaaacgccgcttcagccgctctctttttggcccatatcgctcctattaaaagcgtgagcgcttgcaggatcgctaggatggataacgaatttatcattaaccctagcgcaagccttttgaatcaatccagtttggatttgttcgtgtctggaacgaaagagagtttgaacatgatagaaatgcgctctttggggcaaaaattgaacgctttagaagagcctttaatgttagaagctttagaattggctcaaaaaagtttggaagaaacttgcacgctttatgaagagattttcacgccccaccaaaacgagctgtttttcaaagagagccaaggaatagtctttaatgaaaggctgttagatttattgaaaaatcagtattttgatgaaatcatcaaaggcattgaaagttctgctttgagcgagcgagaaaatgttttcaatgaaattgccagaaaaatcagtgaagcccactcagaattcagtttagaagaaattgaattgtctttagaaaaagtgaaaaagactgagataagacgcatgatcattaaggataaaatccgcccggataagcgcgcgttagaagaagtgcggcccattttgatagagagcgatttgctccctatggcgcatagctccattttattcactagggggcaaactcaaagcttagtggtaggggttttaggcacggataatgacgctcaaacccatgagagtttggagcataaagctcccattaaagagcgcttcatgtttcattataatttccctcctttctgcgtgggcgaagcgagttctattggcgcggcttcaaggcgtgaattagggcatgggaatttggctaaaagagccttagaaacgagcattaaaaataaagagcaggtgatacgattggtttctgagattttagaaagcaatggttcaagctcaatggcgagcgtgtgcgcaggctctttagccctttatgcaagcggtgtggaaatttacgatttagtcgctggggtggctatgggcatggtgagcgaagggcaagatcacgctattttaagcgatattagcggcttagaagacgcagaaggcgatatggattttaagattgctgggaatttagaaggcattacggccatgcaaatggataccaaaatgagcggtatcaagctagaaattttataccaagccttactccaagccaaagaagcacggaaacatattttaaaaatcatgcatgaagcgaaagaaaagattgtgatcaatttttcccatttgcccacaacggagatttttaatgtcgcacccgataaaattgtagaaattatcggtcaaggggggcgtgtgattaaagagatagtagaaaagtttgaagttaaaattgatttgaacaaaccgagcggtgaagtgaaaatcatggggaataaagagcgcgttttaaagactaaggaatttattttaaactacttgcattctttagatcaagaattggagcaatacgctattgatgaggtattagaagctcaagtgaaacgaatcgtggattttggggcgtttttaagcttgcctaaggggggcgaaggcttgttaagaaagcaaaacatggacaagtgtcaagtggttttaaaagaaggcgatagcatcaggtgtagggtgattagcttcaataagggtaaaatcgctttagatttggcttaaaattttaaaaagcgttttttaaaagcgtttttaagctagttt

SEQ ID NO: 284 - protein, 688 aa, Helicobacter pylori
MDFITINSSNKTEEFALKQVAKQATSSLLYRLGKTIILASVCVEREPVSEDFLPLVVQFLEKSYAAGKIPGGFVKREGRAQDFEILTSRLIDRTLRPLFPKDYRYPTQITLMVLSHDIENDLQVSALNAASAALFLAHIAPIKSVSACRIARMDNEFIINPSASLLNQSSLDLFVSGTKESLNMIEMRSLGQKLNALEEPLMLEALELAQKSLEETCTLYEEIFTPHQNELFFKESQGIVFNERLLDLLKNQYFDEIIKGIESSALSERENVFNEIARKISEAHSEFSLEEIELSLEKVKKTEIRRMIIKDKIRPDKRALEEVRPILIESDLLPMAHSSILFTRGQTQSLVVGVLGTDNDAQTHESLEHKAPIKERFMFHYNFPPFCVGEASSIGAASRRELGHGNLAKRALETSIKNKEQVIRLVSEILESNGSSSMASVCAGSLALYASGVEIYDLVAGVAMGMVSEGQDHAILSDISGLEDAEGDMDFKIAGNLEGITAMQMDTKMSGIKLEILYQALLQAKEARKHILKIMHEAKEKIVINFSHLPTTEIFNVAPDKIVEIIGQGGRVIKEIVEKFEVKIDLNKPSGEVKIMGNKERVLKTKEFILNYLHSLDQELEQYAIDEVLEAQVKRIVDFGAFLSLPKGGEGLLRKQNMDKCQVVLKEGDSIRCRVISFNKGKIALDLA

SEQ ID NO: 285 - DNA, 1340 bp, Helicobacter pylori
  CDS (25)...(1296)
aaacaaccacattgcaggaaagacatgaaagataacaataactataatgttttaattgtggggaataaggggcgagagtatgctttggctcaaaggcttcagcaagatgagcgagtgaatgctttgtatttttgtttgggtaatggtggcactcaagatttaggcgagaatctggaatgcgaacattacgagcatatcgtggaattagccctgaaaaaacagatccatttagccatcatttcagaagaagagtttttggttttagggcttacagaaatgctagaaaaagcggggattttagtgtttggggcttctaaagaagcggctaagttagaggcttctaaaagctatatgaaagcttttgttaaagagtgtggcatcaaaagtgcgtcttactttgaaacaaacgacttaaaagaagctttgagttacattcaaaacgcttctttccccttagtcattaaagcgttgaataaaaacacaagcattgtctatcaagaagaagaagcgataaaaatccttgaagacgctttcaaacaaagcaatgagcctgtgattatagagccttttttagagggatttgagctttcagttacagcgctcatagccaatgatgattttatcttgttgcccttttgccaaaactacaaacgcttattagagggggataatggggtcaatacggggggtatgggggccatcgctcctgcaaactttttctctaatgaattagaagagaaaataaaaaatcatatctttaaacccactttagagaaacttcaggctgacaacacgccttttaaaggggttttactcgctgaaattgtaatcatagaagaaaaaggcgttttagagccgtatttattggattttagcgtgcgttttaaagacattgaatgccagacgattttaccccttttagaaagctcgcttttagatttgtgtttggccacagccaaaggggaattacattctcttgaattggtgttttctaaagaatttgtgatgagtgtggcgcttgtttctaggaattaccccactagctcttcgcccaaacaaaccctttatattgatccggttgatgaaaaaaagggtcatttgattttaggggaggtggagcaggataatggcgtgtttgaaagcagtggggggagggtgatctttgccattggtaggggaaaatccttattagaagccagaaaccatgcttatgaaatcgctcaaaaggtgcattttgaaggcatgttttatcgcaaggatattggttttaaggtgttagatttgaaagaatattcttaaaggttaaagtttaagacaaaccaaagagtttgtcttgtttg

SEQ ID NO: 286 - protein, 424 aa, Helicobacter pylori
MKDNNNYNVLIVGNKGREYALAQRLQQDERVNALYFCLGNGGTQDLGENLECEHYEHIVELALKKQIHLAIISEEEFLVLGLTEMLEKAGILVFGASKEAAKLEASKSYMKAFVKECGIKSASYFETNDLKEALSYIQNASFPLVIKALNKNTSIVYQEEEAIKILEDAFKQSNEPVIIEPFLEGFELSVTALIANDDFILLPFCQNYKRLLEGDNGVNTGGMGAIAPANFFSNELEEKIKNHIFKPTLEKLQADNTPFKGVLLAEIVIIEEKGVLEPYLLDFSVRFKDIECQTILPLLESSLLDLCLATAKGELHSLELVFSKEFVMSVALVSRNYPTSSSPKQTLYIDPVDEKKGHLILGEVEQDNGVFESSGGRVIFAIGRGKSLLEARNHAYEIAQKVHFEGMFYRKDIGFKVLDLKEYS

SEQ ID NO: 287 - DNA, 827 bp, Helicobacter pylori
  CDS (17)...(769)
ttaaaatgaagtgaaaatgagagaaataaatatgattttatacattcatatccccttttgtgaaaataaatgcggctattgcgctttcaattcctatgaaaacaagcatgggttaaaagaagaatacactcaagcgttatgcctggatttaaagcatgcgttaagtcaaactgacgaaccaattgaaagcgtttttattggtggcggcacgcctaacactttaagcgtgaaggcttttgaaaggatttttgaaagcatttatcaacatgcgagcttgagcttggattgtgagatcaccactgaagctaaccccgaattgattactaaagcttggtgtcaaggcttaaaaggtttagggatcaaccgcttgagtttaggggtgcaaagttttagggaagataaattattgtttttagagcgccaacattccaaaaatatcgctcctgcgatagaaactattttaaaaagcgggattgaaaatatcagcattgatttgatttataacaccccattagacaatgaaaactctctaaaagaagaattaaaactcgctaaagaactccctatcaaccacttgagcgcttacgctttgagcgttgaaaaaaacacgaatttagaaaaaaacgccaaaaaaccctcatgcgctcattttgacaatgtggtgagagagattttagagggcttttctttcaagcaatacgagtgtctaattacgctagaaattatcaagtcaaacacaacttggcttactggggggctaaagattatttagggtgcggggctggggctgtgggctgcgtggcgaatgagcgcttttttgcaaaaaa

SEQ ID NO: 288 - protein, 251 aa, Helicobacter pylori
MREINMILYIHIPFCENKCGYCAFNSYENKHGLKEEYTQALCLDLKHALSQTDEPIESVFIGGGTPNTLSVKAFERIFESIYQHASLSLDCEITTEANPELITKAWCQGLKGLGINRLSLGVQSFREDKLLFLERQHSKNIAPAIETILKSGIENISIDLIYNTPLDNENSLKEELKLAKELPINHLSAYALSVEKNTNLEKNAKKPSCAHFDNVVREILEGFSFKQYECLITLEIIKSNTTWLTGGLKII

SEQ ID NO: 289 - DNA, 1291 bp, Helicobacter pylori
  CDS (76)...(1257)
gccaagtcattgcttatttcaaaagagaggggtatttatagggtgttaatcgttcaaaaatacggcggcacgagcatgggcagcatagaaaggatccacaatgtcgctcaaagggttttagaaagcgttacattagggcatcaagtcgtggtggtggtttcagcgatgagcggcgaaaccgacaggcttttagaatttggcaagaattttagccataaccctaacaagcgagagatggacaggattgtaagcgtgggggaattggtttcaagtgcggctttgagcatggcgttagaaaggtatgggcatagagccatttccttgagcgggaaagaagcgggcattttaaccagctcgcattttcaaaacgccgtgatccaatccattgacaccaaacgcatcacagagcttttagaaaaaaactacattgtggtgatcgctgggtttcaaggcgctgatattcaaggtgaaacaacgactttagggcgtggggggagcgatttgagcgcggttgctttggccggggctttaaaagcgcatttgtgcgaaatctatacggatgtggatggcgtttataccaccgatccgcgcattgaagaaaaggctcaaaaaatcgcgcaaatcagctatgatgaaatgcttgaactggcttctatgggggctaaagttttattaaaccgctcggtggaattagccaaaaagctcagcgtgaagttagtgactcgcaattcgtttaaccatagcgaaggcacgctcattgtggctgaaaaagactttaaaggagaacgcatggaaacccctatagtgagtgggatcgcattggataaaaatcaggctcgtgtgagcatggagggcgtggaagatcggccaggcattgccgctgaaatctttggcgctttagcggagtatcgcattaacgtggatatgatcgtccaaacgatcggcagagacggcaaaaccgatttggattttacgatcgttaaaacccaaatagaagaaaccaagcaagccttaaagccttttttagcgcaaatggattccattgattatgatgaaaatatcgctaaagtctccatagtgggcgtgggcatgaagtcgcattctggggtggcgagtatcgcttttaaagccctagccaaagacaatatcaatatcatgatgatttctacaagcgagattaaaatttcggttttgattgacattaaatacgctgaattagctgttagaactttgcatgcggtgtatcaattagatcaatgaaaaatttctacgattggatcaaggaatttgt

SEQ ID NO: 290 - protein, 394 aa, Helicobacter pylori
MGSIERIHNVAQRVLESVTLGHQVVVVVSAMSGETDRLLEFGKNFSHNPNKREMDRIVSVGELVSSAALSMALERYGHRAISLSGKEAGILTSSHFQNAVIQSIDTKRITELLEKNYIVVIAGFQGADIQGETTTLGRGGSDLSAVALAGALKAHLCEIYTDVDGVYTTDPRIEEKAQKIAQISYDEMLELASMGAKVLLNRSVELAKKLSVKLVTRNSFNHSEGTLIVAEKDFKGERMETPIVSGIALDKNQARVSMEGVEDRPGIAAEIFGALAEYRINVDMIVQTIGRDGKTDLDFTIVKTQIEETKQALKPFLAQMDSIDYDENIAKVSIVGVGMKSHSGVASIAFKALAKDNINIMMISTSEIKISVLIDIKYAELAVRTLHAVYQLDQ

SEQ ID NO: 291 - DNA, 706 bp, Helicobacter pylori
  CDS (1)...(663)
ggttactctgtgaaaaactccaaccgccttatttatacggacaatcttgaagagagcctagaagagactgcaagcctttttgaacaccacattaaattctacacggagattattgaaaaagacaaaaaggtgatcaaaactttcaacaaggattttaaaatagagcatgccaaagaagtcatttccaaagctcacctaaaacacagcgaattaaacgcttttttaatcgccgctcctagttatggtatagaagcccaaaacgcgcttttaaaaatcttagaagaacccccgaataacgtttgttttatcatgttcgctaaaagccaaaaccatgtgttagccaccattaaatcccgcctaattaaagaagacaaacgccaaaaaatccccctaaaacctttagatttggatttatccaagctggatttgaaagacatttatgcgtttttaaaaaatttagacaaagaaaattttgattccagagaaaatcagagggaaaggattgaaagcctgttagagagcgttaacaggcataagatccccttaaacgagcaagaattgcaagcctttgatttagcgatcaaggctaacagctcttattacaagctcagctataatcttttacccctgcttttaagccttttatccaaaaagaaaacgccatgattgtaaaacgccttaaccctgatgcgctcaaaaacgctct

SEQ ID NO: 292 - protein, 221 aa, Helicobacter pylori
GYSVKNSNRLIYTDNLEESLEETASLFEHHIKFYTEIIEKDKKVIKTFNKDFKIEHAKEVISKAHLKHSELNAFLIAAPSYGIEAQNALLKILEEPPNNVCFIMFAKSQNHVLATIKSRLIKEDKRQKIPLKPLDLDLSKLDLKDIYAFLKNLDKENFDSRENQRERIESLLESVNRHKIPLNEQELQAFDLAIKANSSYYKLSYNLLPLLLSLLSKKKTP

SEQ ID NO: 293 - DNA, 1102 bp, Helicobacter pylori
  CDS (58)...(1059)
tattctctcgcaataattgttattgttattgcgacaaaacttttagaaggagttattatgggaagtatcggtagtatgggcaaacctattgaagggtttttagtggcagccattcagtttcctgtgccaattgtcaatagccgtaaggatattgatcacaatattgaaagcattattagaaccttgcatgcgactaaagcggggtatccgggagtggagcttatcattttccctgagtatagcacgcaaggtttgaataccgctaagtggcttagcgaagagtttttattagatgtcccgggtaaagagacagagctatacgctaaggcgtgtaaagaggcgaaagtttatggtgttttttcaatcatggaacgcaatcctgattctaacaaaaacccctacaacaccgccattatcattgatccgcaaggtgaaatcattttaaaataccgcaagctattcccatggaatcccattgagccatggtatcctggggatttaggaatgcctgtgtgcgagggtccgggcggatcaaaattagccgtgtgcatttgccatgacggcatgattccagagctcgccagagaagcggcctataaagggtgcaatgtgtatatccgcatttcaggctatagcactcaagtcaatgatcaatggattttgaccaaccgctccaacgcatggcacaatttgatgtataccgtgagcgtgaatttagccggctatgataatgtcttttactactttggtgaggggcaaatctgtaactttgatggcacgactcttgttcaagggcaccgcaacccttgggagattgtaaccggggaaatctatcccaaaatggcagacaacgctcgcttaagctggggattagaaaacaacatttacaacctaggccatagagggtatgtggctaaaccgggcggagaacatgacgcaggcttaacctatatcaaagacttagcggccggtaaatacaaattgccttgggaagatcacatgaaaatcaaagacggctctatttatggctaccctaccaccggtgggcgttttgggaaataatccctaaccttgcatttttgctagaacccgtttttaaggg

SEQ ID NO: 294 - protein, 334 aa, Helicobacter pylori
MGSIGSMGKPIEGFLVAAIQFPVPIVNSRKDIDHNIESIIRTLHATKAGYPGVELIIFPEYSTQGLNTAKWLSEEFLLDVPGKETELYAKACKEAKVYGVFSIMERNPDSNKNPYNTAIIIDPQGEIILKYRKLFPWNPIEPWYPGDLGMPVCEGPGGSKLAVCICHDGMIPELAREAAYKGCNVYIRISGYSTQVNDQWILTNRSNAWHNLMYTVSVNLAGYDNVFYYFGEGQICNFDGTTLVQGHRNPWEIVTGEIYPKMADNARLSWGLENNIYNLGHRGYVAKPGGEHDAGLTYIKDLAAGKYKLPWEDHMKIKDGSIYGYPTTGGRFGK

SEQ ID NO: 295 - DNA, 1152 bp, Helicobacter pylori
  CDS (52)...(1095)
tagctatggattttcgccgtatttgtggtggataaaagaaaaggatcttcaatgattgcttacattctcaaacgcttgcttttgattatccctactttattagctatcatgaccattaatttctttttgatccaatcggctcctggaggccctatagagcagatgatggctaaaatcaataacacgcagtccaaagagattcaaggcgttgttaaagagcgttcgtatagggcgtctcaagggttggagagcgatttgttagaaaatttaaaaaaactctatggttttgacaagcccataggggagcgctaccttctcatgctcaaaaaatatctgcaatttgattttggggagagcttttatcgccagattaaagtgatagatttgattaaggaaaaattgcccgtatccatttcgttagggctttttagcacgcttttgatttatcttatttctatccctttagggattttcaaggccaaacgcaataacgagcctttagacgtgttaagcagcgtggtgatcattgtcgctaacgctatcccggcctttttgtttgcggtggtgttgatcgtgttttttgctggagggaattattggcattggttccctttaaaggggctagtgagcgataattttgaaagtttgagcgcgttaggtaaaatcaaggattatttatggcatatcactttgcccgttctttgcatttctttagggggttttgcaagccttacgcttttagtgaaaaactcttttttagatgaaatgggcaagctctatgtactgagcgctaaggctaagggttgttcagtggggcgtattttttatgcgcatgtgttccgtaatgcgattttattagtggtggcgggtttcccgcaagcttttttgggcatgttctttagctcaagtttgttgatagagattgtttttagcctagacgggttagggcttttagggtatgaaagcattgtgagtagggattatcccgttgtgtttggttcgctttatattttcacgcttttaggtttggtagcgagtttgataagcgatttgctctgtgtggtgattgaccctaggattgattttgaaaagcgttgagggtaggaatgaaaactgagatgaaatcttctttaaaactttttatgcggcctt

SEQ ID NO: 296 - protein, 348 aa, Helicobacter pylori
MIAYILKRLLLIIPTLLAIMTINFFLIQSAPGGPIEQMMAKINNTQSKEIQGVVKERSYRASQGLESDLLENLKKLYGFDKPIGERYLLMLKKYLQFDFGESFYRQIKVIDLIKEKLPVSISLGLFSTLLIYLISIPLGIFKAKRNNEPLDVLSSVVIIVANAIPAFLFAVVLIVFFAGGNYWHWFPLKGLVSDNFESLSALGKIKDYLWHITLPVLCISLGGFASLTLLVKNSFLDEMGKLYVLSAKAKGCSVGRIFYAHVFRNAILLVVAGFPQAFLGMFFSSSLLIEIVFSLDGLGLLGYESIVSRDYPVVFGSLYIFTLLGLVASLISDLLCVVIDPRIDFEKR

SEQ ID NO: 297 - DNA, 662 bp, Helicobacter pylori
  CDS (16)...(618)
ttaaaggtctaaaccatggatattaaggcatgttatcaaaacgctaaagcgttattagaggggcatttcttgctcagcagtgggtttcattccaattattatttgcaatccgctaaagttttagaagatcccaaactagccgaacaattagcgctagaattagccaaacaaatccaagaagctcatttgaatattgaatgcgtgtgctcaccggctattggggggattttggctgggtatgagcttgcaagggctttgggcgtgcgttttatcttcaccgaaagggtggataataccatggcgttaaggcgtggctttgaagtcaaaaaaaacgaaaaaattttagtgtgtgaggacattatcactacgggaaaatccgctatggaatgcgctaaagttttagaagaaaagggtgctcaaatcgtggcttttggtgctttagctaatcggggcatttgcaagcgtgctcattctcatttaaaagcccaagagggagcgtgtttgcctagccatttgcccctttttgctttagaagattttgtttttgacatgcacaagcctagttcttgccctttatgcgctactagcgttgctataaagccaggaagtcgtggcaactaaaaaaacaaaaaaaaataaaaccccaaaaaaaaagcaagcgt

SEQ ID NO: 298 - protein, 201 aa, Helicobacter pylori
MDIKACYQNAKALLEGHFLLSSGFHSNYYLQSAKVLEDPKLAEQLALELAKQIQEAHLNIECVCSPAIGGILAGYELARALGVRFIFTERVDNTMALRRGFEVKKNEKILVCEDIITTGKSAMECAKVLEEKGAQIVAFGALANRGICKRAHSHLKAQEGACLPSHLPLFALEDFVFDMHKPSSCPLCATSVAIKPGSRGN

SEQ ID NO: 299 - DNA, 401 bp, Helicobacter pylori
  CDS (40)...(384)
ctctctttgcgcctaaaggcctttatcaccgatatttttatgatttatacccccatgctttatataatgacttatgcgattttagggagcgcgaaggattttagggaaaaccagagcgcgatttttttatgcctgcttttttacgccctaacacacagcttttttatcgcttttaaatcccaaagccctggcatgcgttacgctcggtttaaattaatcaaaaataatggcgaaaaagtgggcttttttttagctttgtggcgctttgttttgtgggtgttgagcatggggttactcatagggtttgttacgccttttatttttaagttttttttgcatgacaaactcagcggcactcatattgaaaccatcaaggaggcaacatgaaaaatttagtaatc

SEQ ID NO: 300 - protein, 115 aa, Helicobacter pylori
MIYTPMLYIMTYAILGSAKDFRENQSAIFLCLLFYALTHSFFIAFKSQSPGMRYARFKLIKNNGEKVGFFLALWRFVLWVLSMGLLIGFVTPFIFKFFLHDKLSGTHIETIKEAT

SEQ ID NO: 301 - DNA, 717 bp, Helicobacter pylori
  CDS (53)...(667)
agcggggctggtatttcagcagaaagcgggattaaaacctttagagacgctgatggcttgtgggaaagggcatgacatcatggaagttgcctcgccttatggctggaaaaagaacccgcaaaaggtgttggatttttacaaccaaaggcgccgacagctttttgaagtttatcctaacaaagcccataaggctttagcggaattggaaaaacactatcaagtcaatatcatcacccaaaatgtagatgatttgcatgaaagagcgggttcttctcgcattttgcacttgcatggggaattattgagcgttcgcagcgagaaagatcctaatttagtttataggtgggaaaaggacttgaatttaggcgacttggccaaagacaaatcgcaattacgccctgatattgtgtggtttggcgaagcggtgcctttgcttaaagaagcgatttctttagtcaaacaagcgcatcttttaatcatcattggcacttctttgcaagtctatcccgccgctagcctctacacgcatgcgcataaagacgctctcatttattacattgaccctaaggctaaaaacgcccatttaccccagaatgtccaatgcattaatgaaagcgcggtgcatgccatgcaagatttaatgcccaaactcatagaaatggcttcttaagaaatgttaaaataatttttattttttcagctaacgattagcaaaaa

SEQ ID NO: 302 - protein, 205 aa, Helicobacter pylori
MACGKGHDIMEVASPYGWKKNPQKVLDFYNQRRRQLFEVYPNKAHKALAELEKHYQVNIITQNVDDLHERAGSSRILHLHGELLSVRSEKDPNLVYRWEKDLNLGDLAKDKSQLRPDIVWFGEAVPLLKEAISLVKQAHLLIIIGTSLQVYPAASLYTHAHKDALIYYIDPKAKNAHLPQNVQCINESAVHAMQDLMPKLIEMAS

SEQ ID NO: 303 - DNA, 468 bp, Helicobacter pylori
  CDS (23)...(421)
attaaaggagtttgagagtctgatgcaacaagccacagaagcattgaatcacccctattttggcgtttttgttttattggtattcaccttttgggtgtttaacttaaccttaaggatccaaaggtttttaagccgtaaaatggctcaaaaaaagggcgaaaagctcaagctcgctccctatgaatgcgggcctgtggctctcaaacagcctaatagggtgtcgcaccatttctatatcatggccatgctttttattttatttgatgtagaaatcgttttcatgttcccttgggcgattggttttaaaaaattaggcttgtttggactcgttgaaatgctaggctttgtcttctttttaaccattggttttatttacgctttaaagcgaaacgctttgagctggcaaaaattagaggtgaaataatgcaacaagcaccggttgttctaagcactttggataaattattg

SEQ ID NO: 304 - protein, 133 aa, Helicobacter pylori
MQQATEALNHPYFGVFVLLVFTFWVFNLTLRIQRFLSRKMAQKKGEKLKLAPYECGPVALKQPNRVSHHFYIMAMLFILFDVEIVFMFPWAIGFKKLGLFGLVEMLGFVFFLTIGFIYALKRNALSWQKLEVK

SEQ ID NO: 305 - DNA, 864 bp, Helicobacter pylori
  CDS (37)...(831)
  misc_feature 388: n = A,T,C or G
agcgatcaaacaagacgctcccaaaaggttagtgtgatggtaagaaaacaatccccctatgaagatgtgcaaaaacaatcgcgccagcatgacccctataaaatcatagaacccacccctaaaaaatatttagagggcagcgcttatgaggtcatttacaaccacctttcttacaaacatgagattttagacaaatacatagagactaacacggctgtgttttggatcaaaaaagacgatattttttctgtcgctacgattttaaggcatttgggttatgagtgtttgagcgaaatgagcgcgatagatttgtgcgctaaaaaagggcattttgaattgttttatcagttcgtgggctttagcgatagctgcaagaaccgccgtaggntgcgcgtgaagtgcgttttgttgcctaatgagagcgtggattctttgagttttttataccgatcggctaattggagcgaaagggaagcgtatgacatgcttggtattgtgtttgacaaacacccctatttgaaacgccttattatgccgcatgattgggtaggccacccattattgcgctcttacccgctcaaaggcgatgaattcgcccaatggtatgaagtggataaaatttttggtaaagaataccgagaagtggtgggtaaagagcagagagacagcgcaagagtggatgaaaaagacactttcaattttgcaaaaattggctatgaacagggcaagggcgaagaattaaaagaagtagaagaaaagcatgcgtttaagaaaatcccttttgtcaaagatttgcacaaaatcgcccccactatcttaaaaaagaggctataaaatggctcaaaatttcacgaaactcaaccc

SEQ ID NO: 306 - protein, 265 aa, Helicobacter pylori
  VARIANT 118: Xaa = Any Amino Acid
MVRKQSPYEDVQKQSRQHDPYKIIEPTPKKYLEGSAYEVIYNHLSYKHEILDKYIETNTAVFWIKKDDIFSVATILRHLGYECLSEMSAIDLCAKKGHFELFYQFVGFSDSCKNRRRXRVKCVLLPNESVDSLSFLYRSANWSEREAYDMLGIVFDKHPYLKRLIMPHDWVGHPLLRSYPLKGDEFAQWYEVDKIFGKEYREVVGKEQRDSARVDEKDTFNFAKIGYEQGKGEELKEVEEKHAFKKIPFVKDLHKIAPTILKKRL

SEQ ID NO: 307 - DNA, 2623 bp, Helicobacter pylori
  CDS (49)...(2580)
tgacgcttacccttatatccctattttatcccactctcaaggaatttcatgatcacaatgaatatcaatggcaaaacgattgaatgccaagagggacaaagcgttttagaggctgctaggagcgctgggatctacatccctaccatttgctatttaagcggttgctcgcccacagtcgcatgcaaaatgtgcatggttgaaatggatggcaaacgggtttatagctgcaacacgaaagccaaaaacaacgccaccattctcactaacaccccaacgctcatggatgaaagaaaaagcatcatgcaaacttatgatgtcaaccaccccctagagtgtggcgtgtgcgataagagtggggagtgcgaattgcaagacatgacgcatttaaccggcgtagagcaccaaccctatgcggtggctgatgattttaaagcactggatttttgggcaaaagccttgtatgatcctaatttgtgcatcatgtgtgaaaggtgcgtaaccacttgtaaggacaatgtgggcgaaaacaaccttaaagccactaaagccgacttgcatgctccggataaatttaaagacagcatgtccaaagacgcttttagcgtgtggagtcgtaagcaaaaaggcattatttcttttgtgggcagcgtgccttgctatgattgcggggaatgcattgcagtatgccctgtgggcgctttgagctataaagatttcgcttacacggctaacgcatgggagttaaaaaagatccattctacttgttcgcattgctcggccgggtgtttgatttcttatgatgtgcgccattttgatactctaggcgaagaatctaaaatttttagagtgcttaatgatttttaccataaccctatttgtggggcaggccgtttcgcttttgatgtgagctctagccctaaaggcagtgctaatcttaaagaagcgcaaaacgccctcaaagaatgcgaagcggtgcgaataggtggggatattacgaatgaagaggcgtttttaatagagcgtttaagaaaagagcttgattttaaaatctacaatcaagaagcgtatcgtttccagcaattcttaaaagtattgggcgaaattaaacgccccagcgttgaagagattaaaacttctcatttagtcgttacgataggatcttctatcaaaacagaaaaccctttggtgcgctatgccatcaataacgctctcaaactcaataaagcttctttaatcgctatgcaccctattaaggataacgcgctagcgaatttgtgccgaagctctttttgcatcacccatgaagtgggggctgaagaaatccttttaggcatgcttttaaaaatgcttaacattgaaagcgcggccctaaaaagcttagaagattccaagcaaaatattgtagatgaagcggctcttaaagccttagaagaagagcgaaaaaaagctttagaacaagccgagcaagggtgcagtattggagaaaataaggcagaaaatcaagaagagaataaaacagaagcgactaccccaaaagaagaaaatcaagaagaaaacaagacagaggttaaagaagaaaaaattgaagtccctaccaaaaccacttatttgctgcttgaagaagcgggcatcaatttagaaacttatgaaaaaattctggctcttttgcaaaaatcaaataacaccctgctagtggttggcgaagaaatctatagccataagcaagcccacaatatcgctaaaatgttgcgtttgctagcccaaaaaagcgctattaaactcattcttatccccccaagcgccaacgctttaggcatcgcttctatttgtcaattgagcgaagaaatttttgaacatgaaaaaattgtaggcattcgcgctcaaggggatttcactatcaatagcgatgatagggtttttggaaaagacgctgccagcaaagtggattttattttacccagtctcaaccagctagaaggcacgatcaccaatattgaagggcgtgtgttgcccttaaaaccggctttgaggtttgagggctatgatttgagcgatattatgcaaggctttggctttgtggaagaaaacctcatagaatgcacccacaaactccctacagaagcgggctttaaagccatagaatttgattatttaaccaactatttcgctaacgacagagtcaaccacagaggctatctgctaggaacaagccattttgaaaagagcgctaaagaatgcgaaaccatagaatgcgagcctatcaagcctttaaaagaaaaaatcgctttcaacgcgtatttaaaatacccagaaacgcaattcaataacgctactaataaaagcgagaatttgcaattaaaagccggtgtctatgtgtctaaagctttcttaaagaaattgaataaagaagtggggcaaaacatcactttatctaaagaagaagaggaattaacaggcgttttgtatcttgatgagagcttggatcaggaagtgtttgttatctcgccttctcttttgaaaaaccattctggcttttttagagagggcgtgtttgatagcgtggatttaaaggagcaagcatgagcgcttatatcattgaaaccctgattaaaattttgatttt

SEQ ID NO: 308 - protein, 844 aa, Helicobacter pylori
MITMNINGKTIECQEGQSVLEAARSAGIYIPTICYLSGCSPTVACKMCMVEMDGKRVYSCNTKAKNNATILTNTPTLMDERKSIMQTYDVNHPLECGVCDKSGECELQDMTHLTGVEHQPYAVADDFKALDFWAKALYDPNLCIMCERCVTTCKDNVGENNLKATKADLHAPDKFKDSMSKDAFSVWSRKQKGIISFVGSVPCYDCGECIAVCPVGALSYKDFAYTANAWELKKIHSTCSHCSAGCLISYDVRHFDTLGEESKIFRVLNDFYHNPICGAGRFAFDVSSSPKGSANLKEAQNALKECEAVRIGGDITNEEAFLIERLRKELDFKIYNQEAYRFQQFLKVLGEIKRPSVEEIKTSHLVVTIGSSIKTENPLVRYAINNALKLNKASLIAMHPIKDNALANLCRSSFCITHEVGAEEILLGMLLKMLNIESAALKSLEDSKQNIVDEAALKALEEERKKALEQAEQGCSIGENKAENQEENKTEATTPKEENQEENKTEVKEEKIEVPTKTTYLLLEEAGINLETYEKILALLQKSNNTLLVVGEEIYSHKQAHNIAKMLRLLAQKSAIKLILIPPSANALGIASICQLSEEIFEHEKIVGIRAQGDFTINSDDRVFGKDAASKVDFILPSLNQLEGTITNIEGRVLPLKPALRFEGYDLSDIMQGFGFVEENLIECTHKLPTEAGFKAIEFDYLTNYFANDRVNHRGYLLGTSHFEKSAKECETIECEPIKPLKEKIAFNAYLKYPETQFNNATNKSENLQLKAGVYVSKAFLKKLNKEVGQNITLSKEEEELTGVLYLDESLDQEVFVISPSLLKNHSGFFREGVFDSVDLKEQA

SEQ ID NO: 309 - DNA, 378 bp, Helicobacter pylori
  CDS (44)...(343)
aaatccatgggaaaaatcacacgcaatttataaaggaatctctatgatagggttaaaccactatttgattgtttcagggttgctcttttgcattggtttagcgggcatgctgaaacgcaaaaacattctgttactctttttttctacagaaatcatgctcaatgcgatcaatatcggttttgtagcgatctctaaatacacgcataatttagacgggcagatgtttgcgctctttattatctctattgccgctagtgaggtggctattggtttgggcttggtgattttgtggtttaagaaattcaaaagcttagatattgattctttaaacgctatgaaaggttgagcatgcaatattcttctttgctgtcagtggtg

SEQ ID NO: 310 - protein, 100 aa, Helicobacter pylori
MIGLNHYLIVSGLLFCIGLAGMLKRKNILLLFFSTEIMLNAINIGFVAISKYTHNLDGQMFALFIISIAASEVAIGLGLVILWFKKFKSLDIDSLNAMKG

SEQ ID NO: 311 - DNA, 663 bp, Helicobacter pylori
  CDS (16)...(627)
ccggtggaataagtcatgcaagcagtgattttagcgaatggggagtttcctaaatctcaaaaatgcttagaccttttaaaaaacgctccctttttaatcgcatgcgatggggctgttacctcattacatgcgcttcaattcaaacccagcgttgttataggcgatctagatagcattgattcgcatttgaaagctttgtataaccctatacgcatgagtgaacaaaacagcaacgatttgtccaaagcctttttttatgctttaaataaaggctgtgatgactttatttttttagggttgaatggcaagcgagaagatcacgctttagcgaacacttttttattgttggaatattttaaattttgccaaaaaatccaagccataagcgactatggtctttttagggtgttagaaacccctttcactttgcccagttttaaaggggaacaaatctcgctttttagcctggatcttaaagcccaattcacttctaaaaacctcaaataccccttaaaaaacttgcgtttaaaaacgctcttttctggctcgctcaatgaagctacagatagttattttagccttagctctacacctaaatcggtggtgttggtgtatcaaaaattcttataagcgggttttgttaggcaagtttttgtctgtata

SEQ ID NO: 312 - protein, 204 aa, Helicobacter pylori
MQAVILANGEFPKSQKCLDLLKNAPFLIACDGAVTSLHALQFKPSVVIGDLDSIDSHLKALYNPIRMSEQNSNDLSKAFFYALNKGCDDFIFLGLNGKREDHALANTFLLLEYFKFCQKIQAISDYGLFRVLETPFTLPSFKGEQISLFSLDLKAQFTSKNLKYPLKNLRLKTLFSGSLNEATDSYFSLSSTPKSVVLVYQKFL

SEQ ID NO: 313 - DNA, 1106 bp, Helicobacter pylori
  CDS (17)...(1048)
agtaaggggttagagcatgaaagttatcaaaacagcacctttgatcccatcagaaattaaggtgctagagaaagagggcaatcgggttaagatttctctggctccatttgagtttggttacgctgttacgctcgctcatcctattagaaggctcttgcttttaagctctgtggggtatgctcctgtaggtttaaagattgaaggcgtccatcatgagtttgactctttaaggggggttactgaagacgtgtcgctttttatcatgaatttaaaaaatatccgctttatagccaaggcgttagtggggcaggatagctctttagaaaaccaatcggttgtggtggattattcttttaaagggcctatggagcttagggctagggatttgaattctgagcagatagaaatcgtcaatccggaaatgcccctagcgacaatcaatgaagacgctcaattgaatttttcgctcattatttataaaggaatggggtatgtcccaagcgaaaacacaagggaattgatgcctgagggctacatgccgctagacggctctttcacgccgattaaaaaggtcgtttatgagattgaaaacgttctggttgagggcgatcccaactatgaaaaaatcatttttgatattgaaacagacgggcagattgacccttataaagcgtttttatcagcggtgaaagtgatgagcaagcaattgggtgtttttggcgaaagacccattgctaacacggagtattcaggcgattacgctcaaagagatgacgctaaagacttgagcgctaagattgaaagcatgaatttgagcgctaggtgttttaattgcttggataaaatcggcatcaagtatgtgggcgaactcgtgttgatgagcgaagaagagcttaagggcgtgaaaaacatgggtaaaaaatcctatgatgaaatcgctgaaaaattgaatgatttgggctatccggtaggcacagaattaagccctgaacaaagagagagtttaaagaaaagattagaaaaattagaagataaaggaggtaacgactgatgagacacaaacacggataccgcaagcttgggagaaccagctcgcacagaaaggc

SEQ ID NO: 314 - protein, 344 aa, Helicobacter pylori
MKVIKTAPLIPSEIKVLEKEGNRVKISLAPFEFGYAVTLAHPIRRLLLLSSVGYAPVGLKIEGVHHEFDSLRGVTEDVSLFIMNLKNIRFIAKALVGQDSSLENQSVVVDYSFKGPMELRARDLNSEQIEIVNPEMPLATINEDAQLNFSLIIYKGMGYVPSENTRELMPEGYMPLDGSFTPIKKVVYEIENVLVEGDPNYEKIIFDIETDGQIDPYKAFLSAVKVMSKQLGVFGERPIANTEYSGDYAQRDDAKDLSAKIESMNLSARCFNCLDKIGIKYVGELVLMSEEELKGVKNMGKKSYDEIAEKLNDLGYPVGTELSPEQRESLKKRLEKLEDKGGND

SEQ ID NO: 315 - DNA, 423 bp, Helicobacter pylori
  CDS (16)...(375)
agacaaggataaagcatggcaaggattgctggtgtagatttaccaaaaaagaagagagtggagtatgcccttacctatatttatgggattgggcttaagagttccagagagattttagaagcggtaggcatttcttttgacaagcgcgtgcatgaattgagcgaagatgaagtgtctagcatcgctaaaaaaatccaacaaagctacctagtagagggcgatttgcgtaaaaaagttcaaatggatattaaatctttaatggacttggggaattatcgtgggatcaggcatcgtaagggtcttcctgtgagaggtcaaaccactaaaaataacgctaggactcgtaagggtaagaaaaaaaccgtgggtagcaagtagcgaataaggagatgatgatttaatggctaagagaaatgtaacggc

SEQ ID NO: 316 - protein, 120 aa, Helicobacter pylori
MARIAGVDLPKKKRVEYALTYIYGIGLKSSREILEAVGISFDKRVHELSEDEVSSIAKKIQQSYLVEGDLRKKVQMDIKSLMDLGNYRGIRHRKGLPVRGQTTKNNARTRKGKKKTVGSK

SEQ ID NO: 317 - DNA, 649 bp, Helicobacter pylori
  CDS (19)...(621)
aagcgtagggtgtttttaatgattttttatagaaaggaagctacaatgaacgcattgaaaaaattaagtttctgcgccttgttatccctaggcctcttcgctcaaacagcgcatgctaagcatttaaagggcacgattaactatcctgattggcttgaaatcaatttttttgacgaaaaaaacccgcccaatcaatatgtcggatcggcttcaatttctggtaaaaggaacgatttttacgccaattacatcccctatgatgaccaattgccccctgaacaaaacgctgaaaaaatcgctcttttaagggccagaataaacgcttacagcactttagagagcattttactcactaaaatgcacaatcgtattgttaaggtgcttcaagttaaaaataatgttatcagccatttattcgggcttgttgattttttaacctctaaatccattttggctaaaaggttcgtggataccacaaatcatcgtgtgtatgtcatggtgcaattccctttcattcagcctgaagacttgatcgcttactttaaagccaaacgcatcgacctttcttcagcgagcgctacccatctcagcgcccttttaaataaggcgttgttccacctctaagagtttgggatttaagatgcggttt

SEQ ID NO: 318 - protein, 201 aa, Helicobacter pylori
MIFYRKEATMNALKKLSFCALLSLGLFAQTAHAKHLKGTINYPDWLEINFFDEKNPPNQYVGSASISGKRNDFYANYIPYDDQLPPEQNAEKIALLRARINAYSTLESILLTKMHNRIVKVLQVKNNVISHLFGLVDFLTSKSILAKRFVDTTNHRVYVMVQFPFIQPEDLIAYFKAKRIDLSSASATHLSALLNKALFHL

SEQ ID NO: 319 - DNA, 540 bp, Helicobacter pylori
  CDS (16)...(513)
gcatgctcttagagtatgtctgtatcgcatgttgctttaatcttaaggaaattgttttatcatagacaaggagtttttatgggcggtttttcagtgggaatgttgaaagattatgtggacatatttgtttttgcggtgcttggcgtggccagttttttagctttgtggtttgcgattgaaagggttattttttattctaaagtcgatttgaaagcttatgacgatatagatgccctgaatttggatttaaccaagaatctaaccattctctatgtgattttttctaacgcgccttatgtgggcttattagggacggttttagggattatggtgattttctatgacatgggcgtgagcggcgggatggacgctaaaacgatcatggtaggtttgtctttggctttaaaagcgaccgctctagggcttgctgtggcgattcccactttgatcgcttataatagcttgttgagaaaatccgatgttttgagcgaaaaattcaggatcatgaaaaaatgaaaagcatcagaagaggcgatgggc

SEQ ID NO: 320 - protein, 166 aa, Helicobacter pylori
MSVSHVALILRKLFYHRQGVFMGGFSVGMLKDYVDIFVFAVLGVASFLALWFAIERVIFYSKVDLKAYDDIDALNLDLTKNLTILYVIFSNAPYVGLLGTVLGIMVIFYDMGVSGGMDAKTIMVGLSLALKATALGLAVAIPTLIAYNSLLRKSDVLSEKFRIMKK

SEQ ID NO: 321 - DNA, 777 bp, Helicobacter pylori
  CDS (25)...(723)
tcatgaattaaaccctagcgaacaatgaagctttttgactacgctcctttgagtttggcttggcgggagtttttgcaaagcgaatttaaaaagccttattttttagaaatagaaaaacgctacctagaagccctaaaaatccctaaaaccattttccctaaaagctctaatctgttttatgcgctcaatctaacgcccccttgtgcggttaaaatcatccttttagggcaagacccctaccattccacctacctagaaaatgatcaagaattgccggtggcgatggggttgagctttagcgtggaaaaaaacgcccctattcctccaagtttaaaaaatatttttaaagaattgcatgcgaatttaggcgtgcctgtgccttgttgtggggatttgagcgcatgggctaaaaggggcatgctcttattgaacgccattttaagcgtggaaaaaaaccaagccgcttcgcaccaatatattggctgggaagcttttagcgatcaaatactgatgcgcctttttgaaacgaccgcccctttaatcgtggtgttactagggaaagtcgcccaaaaaaagatcgcgttaatccccaaaaacaaacacatcatcatcacagcccctcaccctagcccactatctagggggtttttagggagtggggtttttacaagcgttcaaaaagcttatagagaggtttatcgcaaggattttgattttagtttatgattgatgcttaatgagacagaaccccttaagaatgcctttatttaagagcat

SEQ ID NO: 322 - protein, 233 aa, Helicobacter pylori
MKLFDYAPLSLAWREFLQSEFKKPYFLEIEKRYLEALKIPKTIFPKSSNLFYALNLTPPCAVKIILLGQDPYHSTYLENDQELPVAMGLSFSVEKNAPIPPSLKNIFKELHANLGVPVPCCGDLSAWAKRGMLLLNAILSVEKNQAASHQYIGWEAFSDQILMRLFETTAPLIVVLLGKVAQKKIALIPKNKHIIITAPHPSPLSRGFLGSGVFTSVQKAYREVYRKDFDFSL

SEQ ID NO: 323 - DNA, 1242 bp, Helicobacter pylori
  CDS (19)...(1179)
aagaagaaataaaaactcatggggtttttatttgaaaaatcgttaatgagttttttcgctcatccaatcaaaatccttaaaatcatcagtttgattttaagttttttggtaagctttttggttgctgaaaacgctcatgagccagaagaaatcaaggctaaagtggcttatgtgaaaatcccccaattagaagatttggaaaacaacccggtttatatcggtcaaattataggcgtaacttatgatttattgctgtttgacgctgagtttttggaagccaaaatcaaagacgggttggataaaacccaaattgagcttttaaacaagatgcctaaatggaaaaaggtggaaaaagagcttttcagagcgacttattattacaagattaagggcataaaagcgattattccgtccttagaagtgagcgcgttttccaataaagacaaatacatagatcattccatagccccaaaagttactttgcaggtaacggatttgtccaaaaaccctcgttatgcgaatgtcatggctaaagatttacaagtcttgcaatacaaaaccaaagattatgacgataaaaacaatattttggtgatggaaatagcgttcaaagaagccacttgggaagattttcacatcaaagaagcgatcaagcaagggtttgataacgcctctttaaaccagatcaaggctaaagaagggagcgttttttattattgcgtgttgcctaagactattcaaaacctttcttttgattatttctcgctttcaaataagcaatttaaaaccttatctttttcaaccattcccactcaagacactaccggtattcaaagcgatctcatccctaaaaacaattttttagtcttttctaatgtggcgttgctcgctttgtgcgtgtttttcttggtgctgtttttcatttttgggcgcaaactcatttttttagggcttgggattttgtgcttagggtttgttttgtatcaccttttattcacgcaaaaatcagccctattgctcgctcataaaaaaatccgcattctgcccacgcaaaattccaccattttagggctttctaaaaatgaaatgccgattaaaatcttaggctcgcatgatgattattataaaatcctaacgccgcatgaacaaataggatgggtcaaaaaagatgaagtcaaataaaaagtccaatcgtttaagagcgatttatagagctttagtgatcgctataggactagctgt

SEQ ID NO: 324 - protein, 387 aa, Helicobacter pylori
MGFLFEKSLMSFFAHPIKILKIISLILSFLVSFLVAENAHEPEEIKAKVAYVKIPQLEDLENNPVYIGQIIGVTYDLLLFDAEFLEAKIKDGLDKTQIELLNKMPKWKKVEKELFRATYYYKIKGIKAIIPSLEVSAFSNKDKYIDHSIAPKVTLQVTDLSKNPRYANVMAKDLQVLQYKTKDYDDKNNILVMEIAFKEATWEDFHIKEAIKQGFDNASLNQIKAKEGSVFYYCVLPKTIQNLSFDYFSLSNKQFKTLSFSTIPTQDTTGIQSDLIPKNNFLVFSNVALLALCVFFLVLFFIFGRKLIFLGLGILCLGFVLYHLLFTQKSALLLAHKKIRILPTQNSTILGLSKNEMPIKILGSHDDYYKILTPHEQIGWVKKDEVK

SEQ ID NO: 325 - DNA, 1455 bp, Helicobacter pylori
  CDS (34)...(1395)
ttctaatctcaaaaatgggtggtgttattaacaatgacaaaacgactttttaaagggttgttagcggtttctcttgctgtgagtttgcatggtggtgaagttaaggaaaaaaagccggttaagccggttaaagaagatccgcaagaattagcggctaaaagggtggaagcgttcagtcgtttctctaatgtggtttcagaaattgaaaaaaaatatgtggataaaatcagcatttctgagatcatgactaaagcgattgaaggcttgctctctaatttggacgcgcattcagcgtatttgaatgaaaagaagtttaaggaatttcaagcccaaaccgagggcgaatttggggggcttgggatcacggtgggcatgcgcgatggcgttttaaccgttattgcccctttagaaggcactccagcttacaaggctggggttaagtcaggcgataacattttaaaaatcaataacgaaagcacgctgagcatgagcattgatgatgcgatcaacctcatgcgcggcaagccaaaaacccctattcagatcaccgttgtaagaaaaaacgagccaaaacctttagtgtttaacatcattagagacatcattaaactcccctctgtctatgtgaaaaagattaaagaaaccccttatctgtatgtgagagtgagtggttttgacaagaatgttaccaaatcggttttagaaggcttaaaagctaaccctaaggctaaggggatcgtgttggatttaaggggcaatcctggagggctattaaaccaagcggtgggcttgtctaacctcttcattaaagagggggttttagtctctcaaaaaggcaaaaataaagaagaaaatttagaatacaaggctaacggcagagccccttataccaatttgcctattgcggtgttagtcaatggcggttcagcgagcgcgagcgagatcgtcgcaggggcactgcaagatcacaaacgggccgtgattatcggtgaaaaaacctttggtaagggaagcgtgcagatgctgctccctgtcaataaagacgaagccattaaaatcacaaccgcacgctactatttgccgagcgggcgtaccattcaagctaaggggatcacgcctgatattgtgatttatccgggtaaagtgccagaaaatgaaaacaaattcagcttgaaagaagcggatctaaaacaccatttagagcaagagcttaaaaagattgatgataaaacccccaattccaaagaggcggataaagacaagaaaaacgaagaggaaaaagagattactcctaaaatgatcaacgatgatattcagctaaaaaccgctattgacagcttgaaaacctggtctatcgttgatgagaaaatggatgaaaaagcgcctaagaagaaataaaaactcatggggtttttatttgaaaaatcgttaatgagttttttcgctcatccaatc

SEQ ID NO: 326 - protein, 454 aa, Helicobacter pylori
MTKRLFKGLLAVSLAVSLHGGEVKEKKPVKPVKEDPQELAAKRVEAFSRFSNVVSEIEKKYVDKISISEIMTKAIEGLLSNLDAHSAYLNEKKFKEFQAQTEGEFGGLGITVGMRDGVLTVIAPLEGTPAYKAGVKSGDNILKINNESTLSMSIDDAINLMRGKPKTPIQITVVRKNEPKPLVFNIIRDIIKLPSVYVKKIKETPYLYVRVSGFDKNVTKSVLEGLKANPKAKGIVLDLRGNPGGLLNQAVGLSNLFIKEGVLVSQKGKNKEENLEYKANGRAPYTNLPIAVLVNGGSASASEIVAGALQDHKRAVIIGEKTFGKGSVQMLLPVNKDEAIKITTARYYLPSGRTIQAKGITPDIVIYPGKVPENENKFSLKEADLKHHLEQELKKIDDKTPNSKEADKDKKNEEEKEITPKMINDDIQLKTAIDSLKTWSIVDEKMDEKAPKKK

SEQ ID NO: 327 - DNA, 1150 bp, Helicobacter pylori
  CDS (22)...(1098)
gatataaaaggttagttaatcatggattttttaaaagaaaacttaaacactatcatagagggggattgtttagaaaaattgaaagactttcctaacagaagcgttgattttatctttgctgaccccccatattttatgcaaacagagggggaattgaagcgttttgaaggcacaaaatttcaaggcgttgaggattattgggataaatttggctcttttaaggaatacgatgccttttgtttgggttggttgaaagaatgccaaaggattttaaaagataatggcagtatttgtgtgatagggagttttcaaaatatttttagaattggttttcatttgcaaaatttagggttttggatactcaatgatattatttggcacaagagtaatccggtgcctaattttgctggcaagagattatgcaacgcccatgagacgcttatttggtgtgctaaacacaaaaacagcaaagttgcctttaattataaaacaatgaagtacctcaataacgacaaacaagaaaaatcggtttggcaaatccctatttgcatgggtaacgaaagactaaaagatgcgcaaggtaaaaaagtgcattccacgcaaaaaccagaagcgcttttaaaaaaaatcattttaagcgcgactaaacctaaagatattattttagatcccttttttggcacaggcacaacaggggctgtggctaaatccatgaacaggtattttattggtattgaaaaagattctttttatattaaagaagcggcaaaacgcctgaataacactagggataaaagcgattttatcactaatttagatttagaaactaaacccccaaaaatacctatgagtcttttaatttctaaacaattattaaaaatcggggattttttatactcacctaacaaagaaaaaatttgtcaagttttagaaaacggacaagtgagggataatgaaaactatgaaacttctattcataagatgagcgctaaatatttgaataaaaccaaccataatggctggaaatttttttatgcgtattaccaaaatcaatttttattgctagatgaattgcgttatatctgccaaaaggactcttaatggactatcaaacctttaacgagatttttaatcgttttgtctttggaac

SEQ ID NO: 328 - protein, 359 aa, Helicobacter pylori
MDFLKENLNTIIEGDCLEKLKDFPNRSVDFIFADPPYFMQTEGELKRFEGTKFQGVEDYWDKFGSFKEYDAFCLGWLKECQRILKDNGSICVIGSFQNIFRIGFHLQNLGFWILNDIIWHKSNPVPNFAGKRLCNAHETLIWCAKHKNSKVAFNYKTMKYLNNDKQEKSVWQIPICMGNERLKDAQGKKVHSTQKPEALLKKIILSATKPKDIILDPFFGTGTTGAVAKSMNRYFIGIEKDSFYIKEAAKRLNNTRDKSDFITNLDLETKPPKIPMSLLISKQLLKIGDFLYSPNKEKICQVLENGQVRDNENYETSIHKMSAKYLNKTNHNGWKFFYAYYQNQFLLLDELRYICQKDS

SEQ ID NO: 329 - DNA, 1536 bp, Helicobacter pylori
  CDS (34)...(1497)
tagaaaagatcaaacaattataaaaggataaaaatggatcatttaaagcatttgcagcaattgcaaaacattgaaaggatcgtgctttcaggcattgtgttggccaatcataagattgaagaggtccatagcgttttagagcctagcgatttttactacccgcctaacggcttattttttgaaatcgctttaaaactgcatgaagaagattgccccattgatgagaattttatccgccaaaaaatgcctaaagacaagcagatcaaagaagaagatctagtcgctatttttgcggcaagccccatagataatattgaagcctatgtggaagagattaaaaacgcttccattaaacgaaaactttttggcttggctaacaccattagagagcaagccctagaaagcgcgcaaaaatccagcgatattttaggcgctgtggagcgagaagtctatgcgttattgaatggcagcaccatagaaggctttaggaatattaaagaagtgcttgaaagcgcaatggatctcattacagaaaaccaaagaaaggggagtttggaagttactggcataccgactggctttgtccaattggataactatacgagcggtttcaataaggggagtttagtcattataggggcaaggccgtctatgggtaaaactagtttgatgatgaacatggtcttaagcgcgctcaatgacgataggggggtagcggtttttagtttagaaatgtccgcagagcaactcgctttaagggcgttatcggatctcacctctattaacatgcatgatttagaaagcgggaggcttgatgatgatcaatgggaaaatttagccaaatgctttgatcacctttcgcaaaaaaaactctttttctacgataaaagttatgtgaggatagagcaaatccgcttgcaactacgaaagcttaaatcccaacacaaggaattgggtatcgcttttattgactatttgcagctcatgtcagggagtaaagccactaaagagcgccatgagcaaatcgctgaaatttcaagggagcttaaaactttagccagagaattagaaatccctatcatagcgttagtgcaactcaaccgcagcctagaaaaccgagacgataaacggcccattctttcggatatcaaagacagcggggggattgaacaagacgctgatattgttttatttttatatagaggctatatctatcaaatgagggctgaagacaacaaaatagacaaactcaaaaaagaaggtaaaattgaagaggcgcaagagttgtacttaaaagttaatgaagaaaggcgtatccacaagcaaaatggcagcattgaagaggctgaaatcattgtggctaaaaacaggaatggggctacaggaacggtttatacgcgctttaacgctcctttcacgcgctatgaagacatgcccatagattcccatttagaagaagggcaagaaactaaagtggattatgatatagttacaacttgaaagacaaaacttttcagggggcgtttgaacttctta

SEQ ID NO: 330 - protein, 488 aa, Helicobacter pylori
MDHLKHLQQLQNIERIVLSGIVLANHKIEEVHSVLEPSDFYYPPNGLFFEIALKLHEEDCPIDENFIRQKMPKDKQIKEEDLVAIFAASPIDNIEAYVEEIKNASIKRKLFGLANTIREQALESAQKSSDILGAVEREVYALLNGSTIEGFRNIKEVLESAMDLITENQRKGSLEVTGIPTGFVQLDNYTSGFNKGSLVIIGARPSMGKTSLMMNMVLSALNDDRGVAVFSLEMSAEQLALRALSDLTSINMHDLESGRLDDDQWENLAKCFDHLSQKKLFFYDKSYVRIEQIRLQLRKLKSQHKELGIAFIDYLQLMSGSKATKERHEQIAEISRELKTLARELEIPIIALVQLNRSLENRDDKRPILSDIKDSGGIEQDADIVLFLYRGYIYQMRAEDNKIDKLKKEGKIEEAQELYLKVNEERRIHKQNGSIEEAEIIVAKNRNGATGTVYTRFNAPFTRYEDMPIDSHLEEGQETKVDYDIVTT

SEQ ID NO: 331 - DNA, 1246 bp, Helicobacter pylori
  CDS (98)...(1207)
gaaacgcataagggggttggctatcgctttaacccactatgaaaaaaaatcccttaaactctttttagggatttatttaggctcttcgtttgtgttgatgctagtgattagcgttttagcgtttaactatgaaaaaaacgaaaaaatcaaaatgatacgcatggacatggacaaaatggcttctaagatcgctagcgaagtgattgccttgcacatgcaaacgcatggggattatcaaaacgctttaaacgctctcatttcacgctataaagacgcttccatagccctttttgatagtaaaaagcgtgttttgtattctaatatccctgaaagcgccaatttgattaaaaaccataaagaagcgggcttttttagttttaggggagagtattacctattgagcgatgaaactttcgctcacttaggcgtggctaaaatgctttttaaaaattctaaaccccttcatttttcttctttgtatcgtaacattgttttagtgtttgttgtagcgtttttatgcgtgataggggtttctgtgtttttggggcgtttgtttttaaagcccattaggaatgaaatcacccgcattgatcattttttaaaaaacaccacgcatgaattaaacacccccatgagcgctttagtcttgtctttaaaaaccttagaagacaaccaacaacaccgccgcattaaaatcgctatccagcgcatgagttttttataccgctcgctctcgtatttagtgatgcaagatattgagcgcgaatcttttgtgcttttagatttaaaagccctgattattaaagaaaacacgctttttagcgagatgatagactaccacaagctggaatttaaaagcgatttagtggaagtggaacttaaagctaaagagcaggatttcatttcgctttatagcaatttgctcatgaacgcgatcaaatacagcgtcatgaatgggtatatccacatagagctaacgcatgcgtttttgaaagtgaaaaatttagggtatgaaatccctaaagacaagatcacagaattaagcgttcgttatgtgcgtttcaattctggcgtgttgggttatggtatagggttaggtttggtgaaaaaagtgtgcgaaaagtataaaatgcgtttagaaattcatagcgaaccctctttaaagggatcgttttatgaaaattcgttttgcgttcaatttcaaggataaagatgctttcagtgtatgaaaaagtgaatgctctag

SEQ ID NO: 332 - protein, 370 aa, Helicobacter pylori
MLVISVLAFNYEKNEKIKMIRMDMDKMASKIASEVIALHMQTHGDYQNALNALISRYKDASIALFDSKKRVLYSNIPESANLIKNHKEAGFFSFRGEYYLLSDETFAHLGVAKMLFKNSKPLHFSSLYRNIVLVFVVAFLCVIGVSVFLGRLFLKPIRNEITRIDHFLKNTTHELNTPMSALVLSLKTLEDNQQHRRIKIAIQRMSFLYRSLSYLVMQDIERESFVLLDLKALIIKENTLFSEMIDYHKLEFKSDLVEVELKAKEQDFISLYSNLLMNAIKYSVMNGYIHIELTHAFLKVKNLGYEIPKDKITELSVRYVRFNSGVLGYGIGLGLVKKVCEKYKMRLEIHSEPSLKGSFYENSFCVQFQG

SEQ ID NO: 333 - DNA, 703 bp, Helicobacter pylori
  CDS (60)...(665)
gggatagttttaaaaatgatgaagagtttttaacattttcttacgcttggattgataaaatgctgcccaaacttaaagacacagggagtttttatatctttaataccccttttaattgcgctttatttttagcgtatttgcaccataaaaaagtgcattttttaaattttatcacttgggttaaaaaagatgggtttgccaacgccaaaaagcgttataaccacgcgcaagaaagcattttattttatagcatgcacaagaaaaactacacctttaatgccgatgagattcgcatcgcttatgaatccgctgaacgcatcaaacatgctcaaagtaaggggattttaaaaaataacaaacgctggttccctaaccctaagggcaaattatgccttgatgtgtgggaaatcacttcacaaaggcatgttgaaaaagagaagggtaaaatccttaagcccaaacaccccagcatcaaacctaaagcgctcattgaacgcatgataaaagctagctctcacaaaaacgatttgattttagatttgtttagcggcagtggcatgactagcttagtggctaaaagtttggagcgtaattttatagggtgtgagagccatgctgaatacgtgcatgggagtttggaaatgtttaggtataatgaatgcgaataaaaaaggatatttgacatgccaaaattagaaaaaat

SEQ ID NO: 334 - protein, 202 aa, Helicobacter pylori
MLPKLKDTGSFYIFNTPFNCALFLAYLHHKKVHFLNFITWVKKDGFANAKKRYNHAQESILFYSMHKKNYTFNADEIRIAYESAERIKHAQSKGILKNNKRWFPNPKGKLCLDVWEITSQRHVEKEKGKILKPKHPSIKPKALIERMIKASSHKNDLILDLFSGSGMTSLVAKSLERNFIGCESHAEYVHGSLEMFRYNECE

SEQ ID NO: 335 - DNA, 1448 bp, Helicobacter pylori
  CDS (67)...(1404)
agagttctaggggcgtggcgtataagtcaagcgaatattctagcgaagaaaaacaagaggaataacatgaacgaaacgctttattgcagtttttgcaaaaaaccagaatcaagagatcccaaaaaacgccgcattatttttgcgagcaatctcaataaagatgtgtgcgtgtgcgaatattgtatagatgtgatgcatggggaattgcacaaatacgacaattctttattggcgctcaaaagagaccgattgagaagaatggaatctagcgcttatgaagaagagtttttactctcttacattccagcccctaaagagcttaaggcggttttagacaattatgtgatagggcaagagcaggctaaaaaggttttttccgtagccgtgtataaccattacaaacgcttatcttttaaagaaaaactcaaaaaacaagacaaccaagacagcaatgtggagttagagcatttagaagaagtggagttgagcaagtctaatattttactaatcggccctacaggatcaggcaaaactttaatggcgcaaactctggccaagcatttggatattcctatcgccattagcgatgcgactagcttgactgaagcgggctatgtgggcgaagacgtggaaaatattctcacaagattgttgcaagcgagcgactggaatgtccaaaaagcccaaaaaggcattgtgtttattgatgagattgataaaatcagccgtttgtcagaaaaccgctctatcactagagatgtttctggcgagggcgttcagcaagcgttgttgaaaatcgttgaaggttctttagtgaatatcccccccaaaggcggcagaaagcaccctgagggcaatttcattcaaattgacacgagcgatattttattcatttgtgctggagcgtttgatgggttagctgaaatcattaaaaaacgcaccacgcagaatgtgttgggtttcactcaagaaaagatgagcaaaaaagagcaagaagcgatcttgcatttagtccaaacccatgacctggttacttatgggcttatccctgagcttattggccgtttgccggttttaagcacgctagatagcatcagtttagaagcgatggtggatattttacaaaaacctaaaaacgctcttatcaagcaataccagcagcttttcaaaatggatgaggtggatttgatctttgaagaagaagccattaaagaaatcgctcaactcgcattagaaagaaaaaccggggctaggggcttaagggcgatcattgaagatttttgtttggatattatgtttgatttacccaagcttaaaggatcggaagtgcgtatcactaaagattgtgttttaaaacaggctgaacctttgatcattgctaaaacgcattctaaaattcttccttaaggaacacgcttataaatttaacgataaaggattagaaaggg

SEQ ID NO: 336 - protein, 446 aa, Helicobacter pylori
MNETLYCSFCKKPESRDPKKRRIIFASNLNKDVCVCEYCIDVMHGELHKYDNSLLALKRDRLRRMESSAYEEEFLLSYIPAPKELKAVLDNYVIGQEQAKKVFSVAVYNHYKRLSFKEKLKKQDNQDSNVELEHLEEVELSKSNILLIGPTGSGKTLMAQTLAKHLDIPIAISDATSLTEAGYVGEDVENILTRLLQASDWNVQKAQKGIVFIDEIDKISRLSENRSITRDVSGEGVQQALLKIVEGSLVNIPPKGGRKHPEGNFIQIDTSDILFICAGAFDGLAEIIKKRTTQNVLGFTQEKMSKKEQEAILHLVQTHDLVTYGLIPELIGRLPVLSTLDSISLEAMVDILQKPKNALIKQYQQLFKMDEVDLIFEEEAIKEIAQLALERKTGARGLRAIIEDFCLDIMFDLPKLKGSEVRITKDCVLKQAEPLIIAKTHSKILP

SEQ ID NO: 337 - DNA, 911 bp, Helicobacter pylori
  CDS (34)...(858)
agtgttagaaaaaactttgctttgaaatttggcatgaaagcaggcattattggtttagggcttatgggggggagtttagggctagccttgcaagaatgggggcgttttaaaagcgttataggctatgatcataacgctttgcatgctaaattggctttgactttggggcttgtagatgaatgcgtgggatttgaaaagattttagaatgcgatgtgatttttttggccattccggttgagggcatcattggatgtctgaaaaaaatgacctctatcaaaaaaagcgcgaccattattgatttagggggcgctaaagcgcaaatcattcgcaatatccctaaaagcattcgtaagaatttcatcgctgcgcaccccatgtgcgggacagagttttatggccctaaagcgagcgttaaggggctgtatgaaaacgctctagtgatattgtgcgatttagaagattcagggactgagcaagtagagatcgctaaagaaatctttttaggcgttaaagcgcgcttgattaaaatgaaatccaatgagcatgacacccatgtggcttatatcagccatttaccccatgttttgagctatgcgttagccaatagcgttttaaagcaaaacgacccagagatgattttatctttagcgggtgggggttttagggatatgagccgtctgtccaaaagctcgcctttaatgtggaaagatattttcaaacaaaaccgagacaatgtcttagaagcgattaaaaaatgcgaaaaagaaatcgtgcaagctaaggcgtggatagaaaataacgattatgaaagccttgcagaatggatggcgcaagcgaacaaactccaggagttcatgtaaagtaaaatgatgtaaaataatttaaaattttttatattgttgtttttagg

SEQ ID NO: 338 - protein, 275 aa, Helicobacter pylori
MKAGIIGLGLMGGSLGLALQEWGRFKSVIGYDHNALHAKLALTLGLVDECVGFEKILECDVIFLAIPVEGIIGCLKKMTSIKKSATIIDLGGAKAQIIRNIPKSIRKNFIAAHPMCGTEFYGPKASVKGLYENALVILCDLEDSGTEQVEIAKEIFLGVKARLIKMKSNEHDTHVAYISHLPHVLSYALANSVLKQNDPEMILSLAGGGFRDMSRLSKSSPLMWKDIFKQNRDNVLEAIKKCEKEIVQAKAWIENNDYESLAEWMAQANKLQEFM

SEQ ID NO: 339 - DNA, 304 bp, Helicobacter pylori
  CDS (73)...(267)
aataatttaaaattttttatattgttgtttttaggggtgcgaggagcgaaatggggtatttggattgtttttatggattataggctgtttcatatggatagcatggatttacccagcaaccagcaaacaaccataagagattatcttaaacccggatctattgttgtgtttgccataattgtaataataatttcatctcatttctccaacgcctataaaacccttatcgcttctaataaaaaaccagttttaagccatttagaaatttgatttcttaaacctttttatcaaaaataccggtgtt

SEQ ID NO: 340 - protein, 65 aa, Helicobacter pylori
MDYRLFHMDSMDLPSNQQTTIRDYLKPGSIVVFAIIVIIISSHFSNAYKTLIASNKKPVLSHLEI

SEQ ID NO: 341 - DNA, 271 bp, Helicobacter pylori
  CDS (34)...(237)
agctcacattttagaaaaatatttaaagggagaatgatgcaaaatagcgttaaaaaattagaatatgaagagcgtttcaatgacgctcttttgaaattacaagcatgccaagaagaaaagcaggtaacgagttgtttgaaatgcgagcaggttttgaattgcaagatccgcaacagctatgtggatgcggcttatgagagcatgagtttaggcgaacggggcgggtttgatttcaattaaatgggattaaaatggctagtaatactacctt

SEQ ID NO: 342 - protein, 68 aa, Helicobacter pylori
MMQNSVKKLEYEERFNDALLKLQACQEEKQVTSCLKCEQVLNCKIRNSYVDAAYESMSLGERGGFDFN

SEQ ID NO: 343 - DNA, 572 bp, Helicobacter pylori
  CDS (27)...(524)
aaaaggctttttaaaaggacacaccaatgagcgaaccattagaaacattagacaaggataaacaagctatgagtgaagcaattaaaaaagatattgaaaaagacaaagaaaacctcgcacgagtcaaagcagacaaaaaagtcaaagccgatgaaagtgaaaaaggctacgaaaaagacgatgacaaaaaagccgagaatcttgacaaagaaatcgctaaagacaaagctagccctaacgataatgagctttatgaagaggacgatagagttaaacgagacaaagaaagagacgatgccttgcgtgataaagaaaaagccaaagatgacgcatgcatggtaagagcggacgatgacaccatagaggacgatgaggaatatggtgatgatgataagttaagagacgaaatactcggtgttatggaggagttatgcgatacccttaatgataaccttaacttcaaaaaagtcgtctgtatgggcggtaaggtttcaattgcgttcaaatttctaattttttgctcttaatcttttagaaaaaattcaaactctaaggatctatcttttcgttag

SEQ ID NO: 344 - protein, 166 aa, Helicobacter pylori
MSEPLETLDKDKQAMSEAIKKDIEKDKENLARVKADKKVKADESEKGYEKDDDKKAENLDKEIAKDKASPNDNELYEEDDRVKRDKERDDALRDKEKAKDDACMVRADDDTIEDDEEYGDDDKLRDEILGVMEELCDTLNDNLNFKKVVCMGGKVSIAFKFLIFCS

SEQ ID NO: 345 - DNA, 2327 bp, Helicobacter pylori
  CDS (82)...(2283)
caacaagctaaccaaagcattgaagaagctttacagaatgtcccgggtctgcaaattaggaatgcgacaggtgtaggggctatgcctactatccaaatccgtggctttggagctgggggttcagggcatagcgatgcgacgctgatgttagtcaatggtattcctgtttatatggccccctacgctcacattgagctagacattttccccgttacctttcaagccattgatcgcattgatgtgatcaagggtggaggcagcgtgcaatacgggcctaacacttatgggggtattgtcaatatcatcactaagcctatccctaatcaatgggaaaaccaagcggctgaaaggatcacttattgggctaaggctagaaacgctgggtttgccgctcctcctgataaaaccggcgatccttctttcatcaagtctttaggcaacaacctcctctataacacttatgtgaggagtggagggatgatcaataagcatgtgggtatccaagcgcaagctaactgggttagaggacaaggctttagggacaatagcccctctaacatttcaaactattggctagatggagtctatgacatcaatgaaaacaatgggattaaagcctattaccaatactacgattttgctatcgctcaaccaggatcactcagcgagcaagattacaaaataaaccgcttcgctaatttgcgccccttaaaccaaaaaggcgggcgttcacaacgctttggggctgtgtatgaaaaccgcttcggggatttagacaaagtgggcgggacttttagcttcacttactatgggcagttgatgactagggattttcaagtgagctctagctacaatagcgctaacatggttacttgttttagcgaagcggcatgcagggcggcaggacttccggcagggtataacttggctgtgccttattatgccactaactacaatggctgggcagaagtagaaaaccctgtgcgctccattaacaacgcttttgagcctaaagtgaatttgatcgtcaataccgggaaagtcaagcaaacctttatcatgggcttgcgtttcatgaccaccacttttttacagcgccaatacttaaacaccaatgaatgcgccaccaaaacgagcggtgagggggcaggattcttgtgtgagggcgctaatgtgatgagcggttggaaacctcacatcaagcatggcgtttatagaaactggaataactggcgtaacaattacacagcggtttatttgagcgatcgcattgaagcttgggatgggcgctttttcatcgtgcctggtttgcgctacgcttttgtgcaatacaacaacgaaaatgcgtctaactggatgcaaatccctgagaaggatttaagaaaaatcaagcacatgaacaattggatgccctcaaccaacattggctttatccccgtgcaaggcgatcacaatgtgcttacctactttaactaccaacgctctttcgtcccgcctcaattagacgttttgagctatggaggagcggagtattttacccagcactttgacacggtggaagcaggagcgcgctacacctataaggataaattcagcttcaatgcggactacttcaggatttgggcgcgcgattttgccaccgggcagtattcagtctatacaagcggtcccatgaagggtaatgtgcgccccattaatggctattctcaaggcgtggagctggaattgtattacaggcctattagagggttgcaattccatgccgctttcaactacattgacactcgtgtaaccagccatggccctttaaccgacttgaacggggatgtgctaaaagggactagctataacaagcatttcccttttgtaagccctttccaattcattcttgacgctcgttacaattggcgtaaaaccaccatcggtatttctagctatttttacagccgtgcttatagcgggattagcaacagtgcagcaggaggctattatgggatgcaatattatagtggggggaacaactatgaaagcgttcttaatagcggttatcaatgcgaagcttggtgtatgacccaacatgaagggctcttgccttggtattgggtgtggaatatccaagtgagccaaattttctgggaaaacgggagacacagagttacaggaagcttgcaaatcaataatatcttcaacatgaagtattattttacagggattggctctagccctgcaggcttgcaacctgcgcctggaagatcggttacagcgtatttgaactacactttctaaaggctttaaaaaggagggggttattgcgcgatgatgagccg

SEQ ID NO: 346 - protein, 734 aa, Helicobacter pylori
MPTIQIRGFGAGGSGHSDATLMLVNGIPVYMAPYAHIELDIFPVTFQAIDRIDVIKGGGSVQYGPNTYGGIVNIITKPIPNQWENQAAERITYWAKARNAGFAAPPDKTGDPSFIKSLGNNLLYNTYVRSGGMINKHVGIQAQANWVRGQGFRDNSPSNISNYWLDGVYDINENNGIKAYYQYYDFAIAQPGSLSEQDYKINRFANLRPLNQKGGRSQRFGAVYENRFGDLDKVGGTFSFTYYGQLMTRDFQVSSSYNSANMVTCFSEAACRAAGLPAGYNLAVPYYATNYNGWAEVENPVRSINNAFEPKVNLIVNTGKVKQTFIMGLRFMTTTFLQRQYLNTNECATKTSGEGAGFLCEGANVMSGWKPHIKHGVYRNWNNWRNNYTAVYLSDRIEAWDGRFFIVPGLRYAFVQYNNENASNWMQIPEKDLRKIKHMNNWMPSTNIGFIPVQGDHNVLTYFNYQRSFVPPQLDVLSYGGAEYFTQHFDTVEAGARYTYKDKFSFNADYFRIWARDFATGQYSVYTSGPMKGNVRPINGYSQGVELELYYRPIRGLQFHAAFNYIDTRVTSHGPLTDLNGDVLKGTSYNKHFPFVSPFQFILDARYNWRKTTIGISSYFYSRAYSGISNSAAGGYYGMQYYSGGNNYESVLNSGYQCEAWCMTQHEGLLPWYWVWNIQVSQIFWENGRHRVTGSLQINNIFNMKYYFTGIGSSPAGLQPAPGRSVTAYLNYTF

SEQ ID NO: 347 - DNA, 232 bp, Helicobacter pylori
  CDS (37)...(204)
cattggagattgtgccattctttgattttatctaaaatgtctttaggggcagtgattaagcttattttttgttataaattagagggggtaatattagatttaaagcgcatcaatttcaaatcctattatcccaataataaaaatgcattatttatcaacaataaaaaaatccattatctagtgcctcaaaggttcatattgctttaaacttgctatggacgattagaaatcg

SEQ ID NO: 348 - protein, 56 aa, Helicobacter pylori
MSLGAVIKLIFCYKLEGVILDLKRINFKSYYPNNKNALFINNKKIHYLVPQRFILL

SEQ ID NO: 349 - DNA, 1142 bp, Helicobacter pylori
  CDS (24)...(1094)
cttttagaattagggcttaaagcatgaaagctagtatttatgatttcactctaaaggaattgagccagcttttaaaaccaagctttagggctaaacagctttatttgtggctctatgcgaagtataaaacaagctttaaggacatgcaaaataatttttcaaaagattttatcgcttatttggagcgagaatttgctttgcgcacgatagaaatcacgcatgtgagggagagcgttgatggctctaaaaaatacctttttaaatctttaagagacaaccacacttttgaagcggtgttgttgaaaatgaaggataaaaagattgatgcagaaacgaacgctattttagagagggaaaaatacaccgtatgcgtgtcttgtcaaatcggctgtcaagtgggttgctcgttttgtttcactcaaaaaggcggttttgtaaggaacttaaaagcgagcgagatcatccaacaagccctactcattaaagaagacaacaacctcccccttgaaaaagcgctcaacattgtttttatgggaatgggcgagcctttaaacaatttagatgaggtgtgtaaagcgattgagattttcaataccggcatgcaaatttcgcctaaaagaatcaccatttccactagcggcgtagccgataaaatccctattttagcgggcaaaaacttaggcgtgcaattagccatatccttacacgccgtagatgacaaaacgcgctcgtctttaatgcccttgaataaaaaatacaatattgaatgcgttttgaatgaagtgaggaaatggcctttagagcagcgcaaaagagtgatgtttgaataccttttgatcaaagatttgaacgatagcctagactgcgctaaaaaacttttaaaacttttaaacggcattaaatccaaagtgaatttgatcttattcaacccgcatgaaggctctaagtttgaacgccctagcttagagaacgctagaatgtttgcggattttttaaactctaaaggcttattatgcaccattagagagtctaaagccttggatattgaagcggcttgcgggcagttgagggagaaaaaactctctcagcaaatttgaaaacttttttgtggtgtttgtcttttttctaatggggggtgttgg

SEQ ID NO: 350 - protein, 357 aa, Helicobacter pylori
MKASIYDFTLKELSQLLKPSFRAKQLYLWLYAKYKTSFKDMQNNFSKDFIAYLEREFALRTIEITHVRESVDGSKKYLFKSLRDNHTFEAVLLKMKDKKIDAETNAILEREKYTVCVSCQIGCQVGCSFCFTQKGGFVRNLKASEIIQQALLIKEDNNLPLEKALNIVFMGMGEPLNNLDEVCKAIEIFNTGMQISPKRITISTSGVADKIPILAGKNLGVQLAISLHAVDDKTRSSLMPLNKKYNIECVLNEVRKWPLEQRKRVMFEYLLIKDLNDSLDCAKKLLKLLNGIKSKVNLILFNPHEGSKFERPSLENARMFADFLNSKGLLCTIRESKALDIEAACGQLREKKLSQQI

SEQ ID NO: 351 - DNA, 990 bp, Helicobacter pylori
  CDS (1)...(987)
atgcccattctttttgattgtaacgctattgcttcacaagttttaaaagatgaagcgagcgcgcttttagaaagcgttggacaattccaaaaacccaacgatttagaagcgattgtcaaactcattttaaaaagccaagaaaatgggggtaagcttgtgatagtgggtgtgggtaagagcgctttagtggcgcaaaaaatcgttgcttccatgctaagcaccggtaacaggagcgcgtttttacaccccacagaagccatgcatggggatttgggcatggtggaaaaaaacgatgtggttttaatgattagctatgggggcgagtctttagaattattgaatctggtgagccatttaaaacgcttgagccataaaatcatcactttcactaaaagccctaatagctcgctctctaaactcggcgattattatttgagcttgaaaattcaaaaagaagcttgcccgattaacaccgctccaacgacttctaccaccctaactctagcgttaggcgatgttttaatggcatgcttgatgcgagcgaaaaactttagccaagaagattttgcctcctttcatccgggcgggcttttaggcaaaaaactttttgtcaaggttaaagatttactgcaaaccacgaacctccccctaatcgctcctagcacaagttttaaagacgcgctcatagaaatgagtgaaaaacgcttaggcagcgcgattttagtcaatgaagctaacgagcttgtgggggtgttaagcgatggcgatgtccgtagggcgttattaaaaggggtgagtttaaagagcgaagtgaggcattttgccactttaaaacctaaaagctttaagaatttagacgctcttcttttagaagcgttggaatttttagagcgccataagatccagcttttagtgtgcgtagatgatcataataaggttttaggggtcttgcacttgcaccaacttttagaattagggcttaaagcatga

SEQ ID NO: 352 - protein, 329 aa, Helicobacter pylori
MPILFDCNAIASQVLKDEASALLESVGQFQKPNDLEAIVKLILKSQENGGKLVIVGVGKSALVAQKIVASMLSTGNRSAFLHPTEAMHGDLGMVEKNDVVLMISYGGESLELLNLVSHLKRLSHKIITFTKSPNSSLSKLGDYYLSLKIQKEACPINTAPTTSTTLTLALGDVLMACLMRAKNFSQEDFASFHPGGLLGKKLFVKVKDLLQTTNLPLIAPSTSFKDALIEMSEKRLGSAILVNEANELVGVLSDGDVRRALLKGVSLKSEVRHFATLKPKSFKNLDALLLEALEFLERHKIQLLVCVDDHNKVLGVLHLHQLLELGLKA

SEQ ID NO: 353 - DNA, 991 bp, Helicobacter pylori
  CDS (64)...(939)
tccttaaaacatttgaagtataatacactcttatggtcaaatattaagtttaggaaaagctgcatgtggagtttcattcaaaaaatctttaaggctttaatcatcgcacctttagattttatcacgaagtatttcaagtcgtttgtgctgttactcattgtattagtcttttttagcgctaaagaaagcgcgccaagcgccccgcctaatctcgctaaactctatttaaatggggcgatttttagcaccgaggattttgacaaagaagtggataaaatcctaaaaacccctagcattaagggcgttttgcttttgattgactctcctggtggggcggtgtcagcgagcgtggaattgagcgaaaaaatcgctgatttgaagcaaaaaatgcccgttttagcgtatgctaggggggttatggcgagcgggagctattatgcgggcatgcaagcgagcgaagtttatgcctctaaagcgagtttgataggatccattggggtgattttttcaggtgcgaatgtggaaaatttgctcaataaagtcggcgtagccactcaaggcgtgcatgcgggcgaatacaaagaaataggcactttcaccagagcgtggaaacccaacgaaaaagattttttgcaaaatttagtcaatgagcaataccaaatgtttgtgaatgatgtcgcaaaagctaggaaattagacgctaaggattataaggattttgctgaagggaaggtctttagcgctcaaaaggctctgaaattaaaactcattgataaaatcagcacgattaagcaagcgcaagatcgcttaatggaattgagtaaggttaaaaaagcttattggctagaaaaaagccctatggagcgcttcattgaaaaagccacgcaatcagccacaaacatcatcacacaagcctttggctatcaattattaatgagataaagatgttagaatttattttaaaaattcaagctagagactctaaaggctt

SEQ ID NO: 354 - protein, 292 aa, Helicobacter pylori
MWSFIQKIFKALIIAPLDFITKYFKSFVLLLIVLVFFSAKESAPSAPPNLAKLYLNGAIFSTEDFDKEVDKILKTPSIKGVLLLIDSPGGAVSASVELSEKIADLKQKMPVLAYARGVMASGSYYAGMQASEVYASKASLIGSIGVIFSGANVENLLNKVGVATQGVHAGEYKEIGTFTRAWKPNEKDFLQNLVNEQYQMFVNDVAKARKLDAKDYKDFAEGKVFSAQKALKLKLIDKISTIKQAQDRLMELSKVKKAYWLEKSPMERFIEKATQSATNIITQAFGYQLLMR

SEQ ID NO: 355 - DNA, 1114 bp, Helicobacter pylori
  CDS (37)...(1050)
cgagctatcacaacaaatcaatttgtaggaacaagcatgttttttaaaacttatcaaaaattattgggtgcgagctgtttgacgttgtatttagcgggctgtgggagtgatagtagcgagccattggtgggaattgaaaaaaatagcttcaattctaccgtgaaaatcatttctaaaaccgacaacatagaaatccaagacttgaagctcaatcgtggcaattgtgagcatgatcaaaatttcttggtaaagttaatccaagaaacagccaatacatacctgtttgcatcagaaaaagaaaaagcgatcaaaaaccaccaagcaaaaatcgcaagacttcaaaaagatttagaagaactcacacagcatgtgcaacaatccaataatcttgataaattgttagaaaatggaggactattcgttagtggccatgattataaatatacaaaagatgataacccaatatatgttgttaagaggatgcttgataaccttgatagctataaatatgaatcagacgacgtgctagacgtgccatatgagaagctattggaaataagcattgctattgaagacactaaaaaccccaaagactacccttatatcaaccttaaagaactcaaaaaattaatagatagtattattgatgatcatggttatatggccgatggctttttgaatgaatattctaatagggtatcaaaaaaaggtctccaaatccttgctaaactaaaatccatgtggcctagcgtagggaaattttatttcgcctctttgaaagaggctatcccaaggcatgccaaagaagttactgacaagatgattagctctgaagaaaaatctatcaaagccaatcaagtcaaactcactgaagcgaagcaagatattgacaaaatggaaaaaatcattaaagatttagaaagcaagaaaaacaccttatcagtgtatttaaaatttggagaaagtttcacagcgcattataagtgtcaaaatctcatagaagttggagtcaaaaccgataaaggctcctggactttcaactttaacagataaatcaggcaaatatggacaatagcacagacagagcaaaaatccttatagaagagcttaaaat

SEQ ID NO: 356 - protein, 338 aa, Helicobacter pylori
MFFKTYQKLLGASCLTLYLAGCGSDSSEPLVGIEKNSFNSTVKIISKTDNIEIQDLKLNRGNCEHDQNFLVKLIQETANTYLFASEKEKAIKNHQAKIARLQKDLEELTQHVQQSNNLDKLLENGGLFVSGHDYKYTKDDNPIYVVKRMLDNLDSYKYESDDVLDVPYEKLLEISIAIEDTKNPKDYPYINLKELKKLIDSIIDDHGYMADGFLNEYSNRVSKKGLQILAKLKSMWPSVGKFYFASLKEAIPRHAKEVTDKMISSEEKSIKANQVKLTEAKQDIDKMEKIIKDLESKKNTLSVYLKFGESFTAHYKCQNLIEVGVKTDKGSWTFNFNR

SEQ ID NO: 357 - DNA, 847 bp, Helicobacter pylori
  CDS (94)...(807)
gccttgacgcatgtttttgaagtttatcctaaagtcaatatttttttaaaaatccttcacaaagaaggggcttaccacaagcttatttctcgcatgtgtttggtcaaagacaagctcaaagacattatcagcgtcaaaagcgcgctttctttttcgttaaaaggggattttgactgccctttagaagaaaactcgctctttaaagccctccaaattttaaagaattttttaaaatcaaaaaatttctctcattctgtcatcaaatccctagacaccctagcgattgaagtggaaaaaaacatccccactcaagccggattaggcggtgggagcactgatgctggggggctattgtatcatttaaatcagatttttgactggcgtttgagtttagaagagctttatagcatgggatctttagtgggcgcggacaccaattttttcatctcgcaatacaaaagcactaacgccacttcttatggcgaagtcattgaaaattttgaagaagagcctttagaaaatcgcctagaaatctatgcaccaaatcatgttttttgcagcaccaaagccgtttatcaagcttataagcctgaaacttgtttttctcaagctaaagaatggcttaaaaagccgagtttggaatgcctaaaaacttatgatagaaacggattaaacgaccttttaaagccggctttactcactaaccaagccttaaaagatatagaaagcgaactaggcaaggagtggttttttagcgggagcgggagcgcgttttttaggctaaagcctatgcaaaaagggggcgaatgaaactcattgccagcaacaaaaaagcctattttgacta

SEQ ID NO: 358 - protein, 238 aa, Helicobacter pylori
MCLVKDKLKDIISVKSALSFSLKGDFDCPLEENSLFKALQILKNFLKSKNFSHSVIKSLDTLAIEVEKNIPTQAGLGGGSTDAGGLLYHLNQIFDWRLSLEELYSMGSLVGADTNFFISQYKSTNATSYGEVIENFEEEPLENRLEIYAPNHVFCSTKAVYQAYKPETCFSQAKEWLKKPSLECLKTYDRNGLNDLLKPALLTNQALKDIESELGKEWFFSGSGSAFFRLKPMQKGGE

SEQ ID NO: 359 - DNA, 1092 bp, Helicobacter pylori
  CDS (28)...(1047)
tgaaactatccatttaaaggtgtgaaaatggcaaatttagaaaatttagactggaaaaatttaggctttagctacattaaaacggattttcgcttcatcgccacttataaaaacggctcttggtcgcaaggcggattggtgagcgaaaacatgttacaactcagcgaaggctcgccggtcttgcactacgggcaggcttgttttgaaggcttgaaggcttaccgctctcaaaaggggaaagctttactctttcgccctttagaaaacgccaaacgcttgcaaacttcatgcgaaagactgctcatgcccaaagtgagcgaagagctgtttttaagggcatgcgctgaagtggtgaaagcgaatcaaaaatggctcgctccttataaaagcggggcgagtttgtatttgcgcccttttgtcataggcgtaggggataatttgggggtgaagccggctaatgaatacctttttatcgtgttttgtgcgcctgtgggggcgtattttaaggggggtatagaaaaagggggggctaggtttatcactacgatttttgatagggccgcgcctaaaggcaccggtggggtgaaagtgggagggaattacgctgcaagcctgttagcccataaaatggccacagagcaaggctatgatgattgcatttatttagaccctactacgcacactaaaattgaagaagtgggggcggcgaatttttttggcatcacgcatgatgatgcctttatcaccccgcattcgccaagcattctgccaagcattaccaaaaaaagcttgatggttttggctaaagaatatttgaacctcaaagtagaagagagggaaatcctaatggatgagttggatgcgtttaaagaagctggagcgtgcgggacagctgcgatcattacgcccattaaagaaatcgtgcacaacaacaagtcttatttttttgaagcgccgggccatattactaaacgactctatgatttgcttttatccatccaacaaggcgaacaagaagcccccaaagattggatttttgaagttggctaaaaggttaaaatttatagctgtatgccgcataaaataagggcg

SEQ ID NO: 360 - protein, 340 aa, Helicobacter pylori
MANLENLDWKNLGFSYIKTDFRFIATYKNGSWSQGGLVSENMLQLSEGSPVLHYGQACFEGLKAYRSQKGKALLFRPLENAKRLQTSCERLLMPKVSEELFLRACAEVVKANQKWLAPYKSGASLYLRPFVIGVGDNLGVKPANEYLFIVFCAPVGAYFKGGIEKGGARFITTIFDRAAPKGTGGVKVGGNYAASLLAHKMATEQGYDDCIYLDPTTHTKIEEVGAANFFGITHDDAFITPHSPSILPSITKKSLMVLAKEYLNLKVEEREILMDELDAFKEAGACGTAAIITPIKEIVHNNKSYFFEAPGHITKRLYDLLLSIQQGEQEAPKDWIFEVG

SEQ ID NO: 361 - DNA, 2111 bp, Helicobacter pylori
  CDS (31)...(2067)
gttataattttattttttaaaaggatacccatgaataaagttcaatctattgatcctttaatcgctgataagttcaacaacgagttaagaagttataacctagaatacaaactagagcaagaaagcctgaataaagaaattgatgaagctttaaaaaattacgcttctaaaaatgggggtttagggggtaaccgccctgatgtgaaacttttattaaacacacaagaccccaacagaagagtccctattttaatagaatacaaagggctaaaagataagctcattaaattagacaaaaacaaactggtagaaaactttaaaaaccatgagcctcattataaaaacattagagaatacgccctaaatggggctttgcattacgctaatgcgattttacaccacacgagctacactgaatgcatcgccataggcattacaggctataaagacaataagggcggcatatgctctcaaatcgctgtctattatgtgaataaaagcaatctaggcatggggatagatgtttcaaaaggcgagcaaggttatagcgatctctcctttttaagccgtaagcattttaacgactttattaaacgagtagacaccctttctttaagcgatgaagatttagagcgcattagagaaaagaaaaaccaagaaatagaagactgcttaatgcggctcaacaacaatatttacaacaaagaaaagaattttttaagcgaacacaatcgggtatatttagtgattgcgagcattatcgctaatttaggcatccctaatttggtaacccccctaaacaaagaagatctaaaatccagcgatgaggtccatcaaagagatggcgacatcatgctcagaaaaatccaatcctttttagagaataaggatttgtctccagagaaaaggcaaagcattatttcttcattagagactttattaagaaacgaaaacaacaacaaagccactaatggcgaaagctgtttgaagcgttgttttagtgagattgtggatagtttgggcatttattataaaatcggtcttagcacggattttaccggtaaattgttcaatgaaatgtatcgctggctgggtttcacgaaagaccaattaaacgatgtggtgctcacacccccttatgtcgccacgcttttagctagactttctaaagtcaataaggatagtttcgtgtgggattttgccaccggaagcgctgggctattagtcgcaagcatgaatttgatgatagaagacgctaaaaagcgtatcactagtccagaggaattagagcaaaaaatcgcccacattaaagccaagcaacttttagggatagaaatcttatcggatatccatactttagcggtgttaaacatgattttaatgggcgatgggagcagtcaaatcttaaaccaagacggcttgagcggttttgatggcaaagtcaataacgaagcgtttaaggctaatgcctttgttttaaacccgccttattccgctagcggtaatggcatggtgtttgtggagcaggctttagaaaaaatgcaaagcggttatgcgagcgtgatcatccaatcaagcgccggcagtggtaaagccaaagaatacaatgtaaggattttggaaaaacacacgcttttagcgagcattaaaatgcctttagatttattcatcggtaaaagcagcgttcaaacccatatctatgtttttagggtcaatgaaaagcatgacgctaagcaaagggtgaaatttattaatttcagtaacgacggctacgctagagcgaatcgcaaaaaagccaaagccagccacaatttaaaagacacgcataacgccaaagagcgctacaacgaagtcgtggatttagtccatattggccaatcatgtttgaaatttctaagcgaagatgactattatgaaaacaccatagatcccaaaaacgggagcgattggaaccaaaacaaacccactgacaccaaacccgaattagaggattttaaaagaacgatagccgattacctttcttatgaagtaagcttgattttaaaaaaccaaatgcccccaaagcgataggcccccttaatagccaactcaacgctattaagtggggcgag

SEQ ID NO: 362 - protein, 679 aa, Helicobacter pylori
MNKVQSIDPLIADKFNNELRSYNLEYKLEQESLNKEIDEALKNYASKNGGLGGNRPDVKLLLNTQDPNRRVPILIEYKGLKDKLIKLDKNKLVENFKNHEPHYKNIREYALNGALHYANAILHHTSYTECIAIGITGYKDNKGGICSQIAVYYVNKSNLGMGIDVSKGEQGYSDLSFLSRKHFNDFIKRVDTLSLSDEDLERIREKKNQEIEDCLMRLNNNIYNKEKNFLSEHNRVYLVIASIIANLGIPNLVTPLNKEDLKSSDEVHQRDGDIMLRKIQSFLENKDLSPEKRQSIISSLETLLRNENNNKATNGESCLKRCFSEIVDSLGIYYKIGLSTDFTGKLFNEMYRWLGFTKDQLNDVVLTPPYVATLLARLSKVNKDSFVWDFATGSAGLLVASMNLMIEDAKKRITSPEELEQKIAHIKAKQLLGIEILSDIHTLAVLNMILMGDGSSQILNQDGLSGFDGKVNNEAFKANAFVLNPPYSASGNGMVFVEQALEKMQSGYASVIIQSSAGSGKAKEYNVRILEKHTLLASIKMPLDLFIGKSSVQTHIYVFRVNEKHDAKQRVKFINFSNDGYARANRKKAKASHNLKDTHNAKERYNEVVDLVHIGQSCLKFLSEDDYYENTIDPKNGSDWNQNKPTDTKPELEDFKRTIADYLSYEVSLILKNQMPPKR

SEQ ID NO: 363 - DNA, 644 bp, Helicobacter pylori
  CDS (25)...(597)
atcctttgatttcaaaggcttaaaatgtatgtggtgttagaaggcgttgatggcgcgggcaaaagcactcaagtagaattattaaaagaccggtttaaaaacgccctttttaccaaagagccaggggggacgagaatgggcgagagtttaaggcgtatcgctttgaatgaaaacattagcgaattggctagagcgtttttattcttaagcgatagggctgagcatacagaaagcgtgataaaaccggcattgaaagaaaaaaagctcatcattagcgacaggagcttgatctctggcatggcttatagccaattttcaagcttagaattaaacctgcttgccacccaaagcgtcttgcctgcaaaaatcattcttttactcatagacaaagagggcttaaaacagcgcttaagccttaaaagtttagataaaatagaaaaccaaggcatagaaaaattacttcatatccagcaaaagctcaaaacccacgcttatgcgttacaagaaaaatttgggtgcgaagttttggaattagacgctaaagaaagcgttaaaaacttgcacgaaaaaatcgccgcttttataaaatgcgctgtttaacctgtttgaagctttcttttaagcctctttgcccaaattgcttg

SEQ ID NO: 364 - protein, 191 aa, Helicobacter pylori
MYVVLEGVDGAGKSTQVELLKDRFKNALFTKEPGGTRMGESLRRIALNENISELARAFLFLSDRAEHTESVIKPALKEKKLIISDRSLISGMAYSQFSSLELNLLATQSVLPAKIILLLIDKEGLKQRLSLKSLDKIENQGIEKLLHIQQKLKTHAYALQEKFGCEVLELDAKESVKNLHEKIAAFIKCAV

SEQ ID NO: 365 - DNA, 620 bp, Helicobacter pylori
  CDS (23)...(583)
gcaaatcttataaaggacattcatgaaattggttttaggcatcagtggagcgagcgggatacccctagccttgcggtttttagaaaaattacccaaagaaattgaagtttttgtcgtggcgtctaaaaacgcgcatgtcgtggcgttagaagaatctaatattaaccttaaaaacgccatgaaagatttacggcctagtggtacttttttcaacgagcaagacatccatgcgagcatcgcttcagggagttatggtatccataaaatggcgatcattccagcgagcatggacatggtggctaaaatcgcgcatggctttgggggggatttgatttctaggagtgcgtctgtgatgcttaaagaaaagcgccccttactcattgcccctagagaaatgcctttaagcgctatcatgttagaaaatttgctcaaactctcccattctaatgcaatcattgcgccgccgatgatgacttattacacccagagcaagactttagaagcgatgcaagattttttagtggggaagtggtttgacagcttagggatagaaaatgacttatacccacgatggggaatgaactgatgcaaaaaatcggcatttacccgggcacttttga

SEQ ID NO: 366 - protein, 187 aa, Helicobacter pylori
MKLVLGISGASGIPLALRFLEKLPKEIEVFVVASKNAHVVALEESNINLKNAMKDLRPSGTFFNEQDIHASIASGSYGIHKMAIIPASMDMVAKIAHGFGGDLISRSASVMLKEKRPLLIAPREMPLSAIMLENLLKLSHSNAIIAPPMMTYYTQSKTLEAMQDFLVGKWFDSLGIENDLYPRWGMN

SEQ ID NO: 367 - DNA, 341 bp, Helicobacter pylori
  CDS (13)...(309)
ctccctgaagcgatgctcgcatggatgtcttgctcgttgaaaaaagtaccactaggccgtaaatctttcatggcgtttttaaggttaatattagattcttctaacgccacgacatgcgcgtttttagacgccacgacaaaaacttcaatttctttgggtaatttttctaaaaaccgcaaggctaggggtatcccgctcgctccactgatgcctaaaaccaatttcatgaatgtcctttataagatttgcgctttagagctgctcaacacttttgctttgagtattttattgctttctaaatttttcgcttgaatgatttgattaagcgcgccattttctag

SEQ ID NO: 368 - protein, 99 aa, Helicobacter pylori
MLAWMSCSLKKVPLGRKSFMAFLRLILDSSNATTCAFLDATTKTSISLGNFSKNRKARGIPLAPLMPKTNFMNVLYKICALELLNTFALSILLLSKFFA

SEQ ID NO: 369 - DNA, 858 bp, Helicobacter pylori
  CDS (85)...(822)
ggcgccaacgattttaatgatcctcattgtgattttagtggttgtcaagcctttttaaagacaagccatgaaaaaagaaaagtcatgaaaaaagaaaagcatctcaagcaagaaaaaatcatcaacatgtttgatgatatagccagctcttacgatcaagccaaccgcttgatgagttttggcttagacgttaaatggcgagaaagggcttgcgagcatgcgtttttatttttagaaaacaagaaagcgttaaggcttgtggatgtggcatgcgggacgggggatatgcttgtggcttggcaaaaaagcgctctcaattgcggtatagagtttaaggaatgtttggggattgacccctctaataacatgcttgaattagccatcaaaaaatgtgaagagcttgaaaacaaagcttctttcatccaagctcaagccaaagatttaaaaggcgttgaaaataacagcgtggatatcctctctattgcgtatggcttgcgtaatgtcgtggaaagacaagaggccttaaaagagttttttagggtgttaaaacccaggggcgttttagtgattttagaatttttaaaaaaagacaaccccacatggctggataaaatctcagggttttacacgaataaggttttgcctttagtgggaggggctatcagtaagaattatggtgcttattcttatttaccgcaatccattgaggggtttttgagtttagagggtttgaagcatgaattaagaaacgcagggtttgagattttaaggactgaagattctatcgctcaaatttcaacgaccatgcttgttaaaaaaaactaaaggaatgttatgcaagatgaattatttgaaacc

SEQ ID NO: 370 - protein, 246 aa, Helicobacter pylori
MKKEKHLKQEKIINMFDDIASSYDQANRLMSFGLDVKWRERACEHAFLFLENKKALRLVDVACGTGDMLVAWQKSALNCGIEFKECLGIDPSNNMLELAIKKCEELENKASFIQAQAKDLKGVENNSVDILSIAYGLRNVVERQEALKEFFRVLKPRGVLVILEFLKKDNPTWLDKISGFYTNKVLPLVGGAISKNYGAYSYLPQSIEGFLSLEGLKHELRNAGFEILRTEDSIAQISTTMLVKKN

SEQ ID NO: 371 - DNA, 1443 bp, Helicobacter pylori
  CDS (57)...(1403)
aaaattctgagattttatatattttatatttatcgttaggttttaggtttaaagttatggggaggaatcaaggagcttatttggatccgtctgaatcgattttgatgttgatggttgcttttttattggtgctgttgaacgctttttttgtgctttcagagtttgcccttgtgaaagtgcgtaaaacccgcttagaagagctggttaaaatcggtaattccaacgctaaactcgctttaaagatgagtcaaagactagacacttatttgagcgcgacgcagttaggcatcaccctttcttcattagctttaggctgggtgggtgagcccgctatcgcaaaattgttagccgcgctgtttgagtctatggatttgagagaaaatcctatttttatccattcaatgagcgtggtcatagcgtttttaagcatcacttttttgcatgtcgtgttgggcgagattgtgcctaaatctttagcgatcgctaaatctgaaaaagccaccctttttgccgcacgccctttgcatgtgttttgggtggtgttttatccggtggtgcgtttgtttgatgtgatcgctcatttttttttgaaaaagatgggcatcaatcctaaagagcatgacggcacgcattctgaagaagagttaaaaatcattgtgggcgagagtttgagagagggcattattgattcagtggagggcgaaatcattaaaaacgcagtggatttttctgacacgagcgctaaagaaatcatgaccccacgaaaagacatggtgtgtttggatgaagaaaacagctatgaagaaaatatagacattgttttaaaaggccatttcacgcgctacccttattgcaagggttctaaggataacattatcggcatggtgcatattagggatttgctttcgcgctctatttttacccccaaaatgcatgatttcaatcaaatcgttaggaaaatgatcatcgtccccgaaagcgcttccatttctcaaatccttattaaaatgaaaaaagagcaaatccataccgctttggtgattgatgaatacggcggcacagccgggttgctcactatggaagacatcattgaagagatcatgggcgagattagcgacgaatacgacttaaaacaagagggcataaacaagcttgaagagggcgtgtttgaattagagggcatgctggatttagagagcgtagaagaagcgcttcacattgaatttgataaagaatgcgagcaggtaacgcttgggggctatgtttttagcttgttagagcgcatgcctatggagggagatacaatcgtttcgcatgggtattcttttgaagtcttaagcgtggatggggctaggataaaacgcttaaaagcggttaaacaagatcagggagaaaatgaagcatgaaaaaaacaaccctctttgtattgggcttattatttaa

SEQ ID NO: 372 - protein, 449 aa, Helicobacter pylori
MGRNQGAYLDPSESILMLMVAFLLVLLNAFFVLSEFALVKVRKTRLEELVKIGNSNAKLALKMSQRLDTYLSATQLGITLSSLALGWVGEPAIAKLLAALFESMDLRENPIFIHSMSVVIAFLSITFLHVVLGEIVPKSLAIAKSEKATLFAARPLHVFWVVFYPVVRLFDVIAHFFLKKMGINPKEHDGTHSEEELKIIVGESLREGIIDSVEGEIIKNAVDFSDTSAKEIMTPRKDMVCLDEENSYEENIDIVLKGHFTRYPYCKGSKDNIIGMVHIRDLLSRSIFTPKMHDFNQIVRKMIIVPESASISQILIKMKKEQIHTALVIDEYGGTAGLLTMEDIIEEIMGEISDEYDLKQEGINKLEEGVFELEGMLDLESVEEALHIEFDKECEQVTLGGYVFSLLERMPMEGDTIVSHGYSFEVLSVDGARIKRLKAVKQDQGENEA

SEQ ID NO: 373 - DNA, 394 bp, Helicobacter pylori
  CDS (47)...(367)
agaaaccggcacggttaccaaccaagcggtaacaatcttttttaaaatggagcgtttgatcacttcttctttatacacttttttaagcgactttttttctttctttttcaattccaaagcgatggcggtgttcttgcttttttttaagctctctagcatgagcgatttttctttcaaattggctttatcaaagcgctctaaaaagccttcaatttcttctaaatcttccccaaagtgcgcggctacaatgttgtctctgattctagcaaaacgccttcttgattgctctcttaagcgctcccttaaaaagcccaccccaaacaccgcgcccaccacaatatgcgtagagcttacgggcaagcctaattgagaggctaaaagcacggtgatgact

SEQ ID NO: 374 - protein, 107 aa, Helicobacter pylori
MERLITSSLYTFLSDFFSFFFNSKAMAVFLLFFKLSSMSDFSFKLALSKRSKKPSISSKSSPKCAATMLSLILAKRLLDCSLKRSLKKPTPNTAPTTICVELTGKPN

SEQ ID NO: 375 - DNA, 342 bp, Helicobacter pylori
  CDS (16)...(321)
tcaaattcttcataaatgattttttcttttaaaaggacttctttttgcgtgagcgtgccggttttgtctataaagatttttttcactttagccagagtttctaaaaacaacgcttctttaaacacgatcaaagggtttttaaacacccctatcactaacgcaatgggcgtagccagagcgaacgcgcaagggcagctgatgactagcacgctaatacacaccattaaggctttttcaaaattaccccccaaaccaaattgccataacaaaaagcttacaaaggctaaaaacaacaccgctttagaaaaaatatccgcaatttgattcgcgctactctcaatt

SEQ ID NO: 376 - protein, 102 aa, Helicobacter pylori
MIFSFKRTSFCVSVPVLSIKIFFTLARVSKNNASLNTIKGFLNTPITNAMGVARANAQGQLMTSTLIHTIKAFSKLPPKPNCHNKKLTKAKNNTALEKISAI

SEQ ID NO: 377 - DNA, 1108 bp, Helicobacter pylori
  CDS (31)...(1062)
aggctttttgctcttgccttttttcccatcatgagactttatgagagtttattagaaatgtgcttgaataaggcatgggagcatcaaaccctagccttagaaaacccaagcgtagcttgcatggtgttggataaaaaccatgagatcttgagtttagaaacccacaaaaaagccaaaaccccgcatgcagaagtcttagccgcccaatcagcgctaaagattttacgccccagtttgaaaaacgatttagaaaagttagaagaccctaaaactttaagcgattttttaaaaacgcaccacgataacgcttttacagactgcgtttttttaatcaccttagagccatgcaattcttatggcaaaaccccggcttgtagcgaattgttagaaattttaaagcctaaaagagtggtcattgccacagaagaaaacgaagctaaaaaagggggtttagcaaggctacaaaaggctcgtattgaaacaataatttgccacaatttagaaaacaaagctaaagacttgctcttgccttttagggtaatggaacaaaaggggcgttttaatttgttcaaactcgctttaagaatgaatggggattaccatcatggcaagatcaccgggcaaaaaagcgttattttcacgcacaaccagcgagcaatatgcgacacgcttattgtttctgggaaaaccataagaacggacaaccccttattggacgctcgcttttgcgacagcttttatcaaaataaaaaccccaatatcgctattttatccaagcgctcaattgaccctaattcaaaagttttttctgcgcctaatcgtttagttaacactttccatgaccccaaagatttacccctagagaaggggtttaatttcattgaaggggggtgggaattgtttgagagcttgagggataaaatagacgcgttgcttttgcattcgcatgcgtctatgattggcgaagcgtttaaggcactcgctctaaaaaccccttttaaaggacggttgttgcatgcgcaaatcttagaaaatgaagcccttttatggatagaaaactcttaagattataccagcctttgaacgcttattcttacaacagcgattc

SEQ ID NO: 378 - protein, 344 aa, Helicobacter pylori
MRLYESLLEMCLNKAWEHQTLALENPSVACMVLDKNHEILSLETHKKAKTPHAEVLAAQSALKILRPSLKNDLEKLEDPKTLSDFLKTHHDNAFTDCVFLITLEPCNSYGKTPACSELLEILKPKRVVIATEENEAKKGGLARLQKARIETIICHNLENKAKDLLLPFRVMEQKGRFNLFKLALRMNGDYHHGKITGQKSVIFTHNQRAICDTLIVSGKTIRTDNPLLDARFCDSFYQNKNPNIAILSKRSIDPNSKVFSAPNRLVNTFHDPKDLPLEKGFNFIEGGWELFESLRDKIDALLLHSHASMIGEAFKALALKTPFKGRLLHAQILENEALLWIENS

SEQ ID NO: 379 - DNA, 823 bp, Helicobacter pylori
  CDS (14)...(799)
acgattttaaaaaatggctagaagtttcaagcattctcaatatcctaaaatttttaagccactataccctaacaacttaacgctttcacttaaaaagcaacatgttataatgatcgctattttatttgaaagggtatttatggaaagcgttttaaatttcctaaccaatatcaatgtgattttcacccttttgggctatttgattggggggattccttttggctatgcgttaatgaaaatcttttacggcatggatattactaaaatcggatcggggggcattggcgcaacgaatgtcttgcgtgctttacaaagtaagggcgtgagtaacgctaaacaaatggccctattagttttaatcttggatctcttcaaaggcatgtttgcagtatttttgagcaaattgtttgggttggattatagtttgcaatggatggtcgctatcgctagcattttagggcattgctattcgccttttttgaatttcaatggaggtaagggcgtttctacgatcatgggctctgtggtgttgctcatccctattgaaagtctcatcggcttaacggtgtggttttttgtgggtaaggtgcttaaaatctcttcactcgctagcattctaggggtaggcacagcgactgttcttatcttttttgtgccttatatgcatatcccagacagcgtcaatatccttaaagaagtcggcacgcaaacgccgatggtgcttatttttattttcacccttatcaagcatgcgggtaatatttttaatttattggccggcaaggaaaagaaagtcttatgaaaactaaacaaggcgttcata

SEQ ID NO: 380 - protein, 262 aa, Helicobacter pylori
MARSFKHSQYPKIFKPLYPNNLTLSLKKQHVIMIAILFERVFMESVLNFLTNINVIFTLLGYLIGGIPFGYALMKIFYGMDITKIGSGGIGATNVLRALQSKGVSNAKQMALLVLILDLFKGMFAVFLSKLFGLDYSLQWMVAIASILGHCYSPFLNFNGGKGVSTIMGSVVLLIPIESLIGLTVWFFVGKVLKISSLASILGVGTATVLIFFVPYMHIPDSVNILKEVGTQTPMVLIFIFTLIKHAGNIFNLLAGKEKKVL

SEQ ID NO: 381 - DNA, 404 bp, Helicobacter pylori
  CDS (31)...(381)
tttattggccggcaaggaaaagaaagtcttatgaaaactaaacaaggcgttcatatccataacttggtgtttgaggcgattttggggattttagaatttgaacgcttaaaaccccaaaaaataagcgtgaatttggatcttttctacacgcaattacccaataaggtttatttagactacatggaaattcaagagcttattcaaaagatgatgcaagaaaaccaataccttctcattgaagacgccctgaaagatttgagccatgctttaaaaacgcgctacaaggagatcactgaactttatttaaaaatcagcaagttagagatttctcccaattctcaagtgggagcgagcgtgaaaatccgctatgaaagcaatctttagcctctttttccttcttattg

SEQ ID NO: 382 - protein, 117 aa, Helicobacter pylori
MKTKQGVHIHNLVFEAILGILEFERLKPQKISVNLDLFYTQLPNKVYLDYMEIQELIQKMMQENQYLLIEDALKDLSHALKTRYKEITELYLKISKLEISPNSQVGASVKIRYESNL

SEQ ID NO: 383 - DNA, 1227 bp, Helicobacter pylori
  CDS (52)...(1209)
taaaataacgcttattttaaactctcaaaaaaggaatcaaacgcactcatcatggctaaagaaacgcttgaaataaccccggatcttttgaaaaacccttatcaaaaaatcatcaatgcgagcgcgagcgtttttgatgaaaagcatgggcgatcgttttttagcacgcaattttatgaaaaaattgaaccttatttaaaagaagttttaacccatcccattgatttagaatgcgatctaaacaccgctaaaaaaaagaaccgcttaacccctttaaaacagctttttaaagcgtgttttaacaccgaagaaattttgattgtgaataataacaccagcgcgattttcctcatcgctaacgctttagcgcaagaaaaagaaatcattgtttcttatggcgaattagtggggggggattttaaccttaaagatattttattaaatagtggggctaggctgcatttagtggggaatattaatcgcgcttatttaagggattaccgcttagccttgaatgaaaacagcaaaatactctttaaaacccacaacccccattttaaaaaagacacgccctttaaagatttacaaactcttgctaaagagcatgatctcattgattattacaatttaggggatgtggatttgtcaaacagagtggctttggaagaaattttagccctaaaaccatcgcttttaagctttagcgcggataaattctttaacagtgcgcaagcgggcattattatggggcaaaaagaacgggttgaagcgttaaaaaaccaccccctttatagagttttaagggtgggtaaaatcacgctcaccttgcttttttgcagcctaaaagcatggataaatcatcaagaagacattacaatccatgcgttattgaaccaaactaaagacgcattattgcaaaaagccctcaaactctacgctcttttaaagcctttagaattgaatgtgagcatagcctctagcttttctaaaatagggaatttgtttggtagggaattagaatccttttgcgtgaaaatccagcccaaaaacacccgtgctttaaatagtgagaaactttatttaaagcttttccaaaaaggcgttatcgcaaggatttcatgcgaattcgtgtgctttgaagtctttagcttgaatgaaaaagattttgaaaaaatcgctctggttttagaagaaattcttaataaagcttaaaaattcgctataata

SEQ ID NO: 384 - protein, 386 aa, Helicobacter pylori
MAKETLEITPDLLKNPYQKIINASASVFDEKHGRSFFSTQFYEKIEPYLKEVLTHPIDLECDLNTAKKKNRLTPLKQLFKACFNTEEILIVNNNTSAIFLIANALAQEKEIIVSYGELVGGDFNLKDILLNSGARLHLVGNINRAYLRDYRLALNENSKILFKTHNPHFKKDTPFKDLQTLAKEHDLIDYYNLGDVDLSNRVALEEILALKPSLLSFSADKFFNSAQAGIIMGQKERVEALKNHPLYRVLRVGKITLTLLFCSLKAWINHQEDITIHALLNQTKDALLQKALKLYALLKPLELNVSIASSFSKIGNLFGRELESFCVKIQPKNTRALNSEKLYLKLFQKGVIARISCEFVCFEVFSLNEKDFEKIALVLEEILNKA

SEQ ID NO: 385 - DNA, 1238 bp, Helicobacter pylori
  CDS (13)...(1197)
aggaacttaagaatggaaaaaatcagcgatcttatagaatgcattgcgtatgaaaaaaatttgcctaaagagatgatttcaaaagtgattcaaggctgtttgttaaaaatggcgcaaaatgagttagaccccctagcacgctacttggtggttgaagaaaacaagcagctccagcttatccagttggtagaagttttagaagatggtgatgaaagattggttaacgacccttctaaatacatcagcctgtctaaagccaaagaaatggatccaagcgttaagattaaagacgaattgtcctatagcttgagtttggagagcatgaaacaaggagcgatcaaccgcctttttaaagatttgcaataccagttagaaaaagcgttagaagacagccactttgaagcgtttcaaaagcgtcttaacagcgttttaatggggcaagtgattttagtggatcacaaccaaaacacctttattgagattgagcagcaatttcagggcgttctttccatgcgccatcgcatcaagggcgagagttttaaagtgggcgatagcattaaagcggttttaacgcaagtcaaacgcacgaaaaaaggcttattattagagctgagccgcaccacccctaaaatgcttgaagctttgttggaattggaagtccctgaaattaaagacaaagaaattgaaatcatccattgtgcgcgaatcccaggcaacagagcgaaagtgagctttttttcccataacgctaggattgaccccataggcgcggctgtgggggttaagggcgtgcgcattaatgcgatcagtaacgaattgaataaagaaaacattgattgcatagaatattctaatgtgcctgaaatttacatcactctcgcactcgctccagccaaaattttaagcgttgaaatcaaaaaaatccctatagaagaattgaatgctgaagaaaaagaatccattcaagagcgttttatcgtcaataaccatttgcaaaaggctaaagtgcgtttattggacattgaaaaatctaaggctatcggtaagggcggggtgaatgtgtgcttagcgtccatgcttacaggctatcacatagagtttgaaaccattcctagcgtgaaagaaaacgcagaaaatgaaagcgaaaaagaaacgccaaaagtgggggtagaagctttagagtctttgtttaagaattaagggtatctaaaattcaatctctaaaaaagcttttaact

SEQ ID NO: 386 - protein, 395 aa, Helicobacter pylori
MEKISDLIECIAYEKNLPKEMISKVIQGCLLKMAQNELDPLARYLVVEENKQLQLIQLVEVLEDGDERLVNDPSKYISLSKAKEMDPSVKIKDELSYSLSLESMKQGAINRLFKDLQYQLEKALEDSHFEAFQKRLNSVLMGQVILVDHNQNTFIEIEQQFQGVLSMRHRIKGESFKVGDSIKAVLTQVKRTKKGLLLELSRTTPKMLEALLELEVPEIKDKEIEIIHCARIPGNRAKVSFFSHNARIDPIGAAVGVKGVRINAISNELNKENIDCIEYSNVPEIYITLALAPAKILSVEIKKIPIEELNAEEKESIQERFIVNNHLQKAKVRLLDIEKSKAIGKGGVNVCLASMLTGYHIEFETIPSVKENAENESEKETPKVGVEALESLFKN

SEQ ID NO: 387 - DNA, 3903 bp, Helicobacter pylori
  CDS (21)...(3857)
aagcgatgtaaggaattaacatggattataaaaaattagatttacccaacacaaactacccaaatcaagagcaactgaaagcttttgaaaccgcttttgacgcctttttagaaaccaaccaacaagaaaatgaaaatcaccaaaacgacgcttttaatgatttattgaaaggcgtttttaaatacaaggttaagcccaccaaaaaaatagacagcactattcttaatgaaaataacgaagtggaggtgatcattgaatttaaagcccttaaaaaccccaacgaatttattaaaaagggcgatttgaatgttaaagcctttcatgaaagccttttgtcttatctcacagaaagaaaagagggtaataacaaccttaagcatcttatcttagccactattaaagagctttatatcattgatgcaaacgaatttgaggtttttaataaagataaagaaattgaaaacgcctttaaaaattgccacgatagaaagggtaacgatacacgcacaaaagcgttttatgatgcttgccaaaagcgccttaatgagtttgatcgttctttgaaataccactatatccccctcaaaaaagaaaatttagccctaatctatcaagccctaagccctaattttttgctcaaaattccaaaatattctgacgctaacacgcttaacaaagatttttatgaagaattgctttacattttagggttagaagagcaaaatgacaaagggaaaattttaatcaagcccagccgcacccaaaattccctaagcgatgctttaaaaaaggaatacaaaaatttagacgatgaagaagtcatggcgttgctcatcgcttggaataaccgcatcttgtttttacggcttttagaaagccttttaatttcttttaagcattttgaaaatcctttcttaaccacagaaaactttgaaaatttcaacgatttaaacacgctcttttttgaagtcctagccaagaaaaacagcgagcgcttaccagaaattaaagaagacaagattttagaaaaaatcccttatttgaattccagtttgtttgataaaacgcctttagaattaaaggggcatgaaatcaagcttttagacaataaaaagctagaaatctataaaaattccgttctcaaaaaacataaagattatcaaaaagaaaaacctttgcccttgctaaaatacctttttaaatttttgcgtctttataaattcaccaccacccctaaagacattaaagataataccgataccagcgaaagccgtttgattaaccctagcgttttagggcttgtttttgaaaaactcaacggctataaagaggggagcttttataccccaagctttatcacaagctacatgtgcaaagagagcatcacgcccatcgtgttggataaattcaacgccatttatcagtgggactgcgaaaatctaaaagcgttgcgaggagaaatagacagaaatttttcaaatgaaaaagctaaagaatacctaaacacgcttttaaccttgcgtatttgcgatccggcggtggggagcgggcatttcttggtttcagcgctcaatgaaatggtgcgggttgcttatgagctaggacttattgcttccttgtatcgctacgatcttaaattagaaaacgatgaaatcatcattcaccacacgccaacgggtgaaatctttaactacataaaaccagatagcgaaaacgacccccaccaccacatccaaaaagaactttttaatcttaaaaaatccattattgaaaactgcctttttggcgtggatattaaccccaattcttgcgaaatcaccaagctcaggctatggatagagcttttaaaatacagctattatatttttgaaaagggcaagaacactaacgcgcttgaaaccctccccaacattgatattaacattaagtgcgctaattcgctcatttctaggtttgccctcaaagataaagccttgttaaaaagcgaaaaaaataaaaacctagaatactctatcgctgaatacaaagaactcgttaaaatctataaagaccctaaaatcttagaaaccctaacgcaccccataaaagactctaacgccgttagaaaatacgctaaagaacgcctttatcaagaactaaaacaaaatcctaacaaagattttaaaaaggctctcaatgataggatagagaaaattaaaaaagcttttaaactcactttaaacccccctccaaaagaattaaaatttaaaaaatttttaaaagagcatttagaactctatggcaagagtatcttagaagaggcaaactacaacggcttagaattggaagccctagcattagaaaagcaaatggcgaatcttttttttgattatagaccctaccccaaactagacaaatcggataaagtagtaggactagaacattttaaccgctatgtcctaacatcttataaagatttacaagatgaaaacgaacgctacgctaacgctcttgaatggcgctttgaattccctgaagttttagatgatgagggggatttttcaggctttgattgcatcattgggaatccaccttatatccgccaagaacacatcaaagacttaaagcctttattagaaaagcaataccaagatttctataacagcaccgctgacatttacacctacttttttgccctggctttccaccttttaaaagaaaaggggtttagcgctttcatcacttctaacaaatatacgcgagccaaatacggcgctaaattgagggaatggctgctcaaaaaaaccaccatcgtcagctacatggaactaaacgccttaaaagtctttgagagcgctgcagtggataccagcatcattcatttcatcaaacaaacgccctctaaagagagcgaatttaaatattacgaacccaccccaaacgataaagacgatttgaaaagcaccccacaccttttgatgaaacaaaacgtgctttcaacagaaagctttatttttgccaacgccacgcttttagatttgagggacaaaatagagagtgttggcaccccgcttaaagactgggacattcaaatcaattatgggataaaaaccggcgcgaacgaagcctttatcattcccactgaaaaaagagaagagatcttaaacgcttgcaagacgcaagaagaaagggagcgcacagagaggcttattaagcctattttaagagggaaagacattaaaaggtattcttatgagtgggcgcatttgtgggttatcaacacccataacggctacacttcttctctcaaatccaaaatccctcccattgatatagaaaaataccccgcaattaaagcgcatttagacgctcattacgacactattgcaacacgatgcgatcaaggagacaccccctatcacttaaggaattgcgcgtatttagaggattttgaaaaagagaaaattgtgtgggcaagtgtgggatttgttgaatattgtatgatcccaggattattgatacttgatacaaattatttttttgaagtcagtaaatttggcaatacaaaaaactatttgcttggacttttaaattcaaaattgctaactttttggttaaaagctaaaaatacaccattaggcgatatgggagcttatagaaattataagtataatattatggagttaccgatggtaaaaataacggcaaaaaataaaaaaatcgccgataaaatcatcgctttagtggataaaatcctacaagcaaaagaaaaagaccctaaagccaacacccaaaagttagaaaaagaaattgacgccttagtctatcagctctaccacctcaccgatgaagaaattaagatcattgaagaggggcagtgaatggaaaagttatttgaaaagatattgcatgaaatgagatcaa

SEQ ID NO: 388 - protein, 1279 aa, Helicobacter pylori
MDYKKLDLPNTNYPNQEQLKAFETAFDAFLETNQQENENHQNDAFNDLLKGVFKYKVKPTKKIDSTILNENNEVEVIIEFKALKNPNEFIKKGDLNVKAFHESLLSYLTERKEGNNNLKHLILATIKELYIIDANEFEVFNKDKEIENAFKNCHDRKGNDTRTKAFYDACQKRLNEFDRSLKYHYIPLKKENLALIYQALSPNFLLKIPKYSDANTLNKDFYEELLYILGLEEQNDKGKILIKPSRTQNSLSDALKKEYKNLDDEEVMALLIAWNNRILFLRLLESLLISFKHFENPFLTTENFENFNDLNTLFFEVLAKKNSERLPEIKEDKILEKIPYLNSSLFDKTPLELKGHEIKLLDNKKLEIYKNSVLKKHKDYQKEKPLPLLKYLFKFLRLYKFTTTPKDIKDNTDTSESRLINPSVLGLVFEKLNGYKEGSFYTPSFITSYMCKESITPIVLDKFNAIYQWDCENLKALRGEIDRNFSNEKAKEYLNTLLTLRICDPAVGSGHFLVSALNEMVRVAYELGLIASLYRYDLKLENDEIIIHHTPTGEIFNYIKPDSENDPHHHIQKELFNLKKSIIENCLFGVDINPNSCEITKLRLWIELLKYSYYIFEKGKNTNALETLPNIDINIKCANSLISRFALKDKALLKSEKNKNLEYSIAEYKELVKIYKDPKILETLTHPIKDSNAVRKYAKERLYQELKQNPNKDFKKALNDRIEKIKKAFKLTLNPPPKELKFKKFLKEHLELYGKSILEEANYNGLELEALALEKQMANLFFDYRPYPKLDKSDKVVGLEHFNRYVLTSYKDLQDENERYANALEWRFEFPEVLDDEGDFSGFDCIIGNPPYIRQEHIKDLKPLLEKQYQDFYNSTADIYTYFFALAFHLLKEKGFSAFITSNKYTRAKYGAKLREWLLKKTTIVSYMELNALKVFESAAVDTSIIHFIKQTPSKESEFKYYEPTPNDKDDLKSTPHLLMKQNVLSTESFIFANATLLDLRDKIESVGTPLKDWDIQINYGIKTGANEAFIIPTEKREEILNACKTQEERERTERLIKPILRGKDIKRYSYEWAHLWVINTHNGYTSSLKSKIPPIDIEKYPAIKAHLDAHYDTIATRCDQGDTPYHLRNCAYLEDFEKEKIVWASVGFVEYCMIPGLLILDTNYFFEVSKFGNTKNYLLGLLNSKLLTFWLKAKNTPLGDMGAYRNYKYNIMELPMVKITAKNKKIADKIIALVDKILQAKEKDPKANTQKLEKEIDALVYQLYHLTDEEIKIIEEGQ

SEQ ID NO: 389 - DNA, 1415 bp, Helicobacter pylori
  CDS (28)...(1377)
tttaaatcatttaaaaaaaggatagagatgcaaaataaagaaattggtgaagaaaaaagcgttaatgaaaaaaatgtagaggtttttaatcgttattttcccggttgcttgagtatagaaaatgataacaagctcacgctggatacaggaaaattaaaagcgttactaggggattttagcgagataaaagaagagggctatgggttggattttgtgggtaagaaaatcgccttaaaccaagcttttaagaaaaatcataagattttaaagcccttaaacgaatccactagcaagcacgttctcatcaagggcgataatttagacgctctcaaaatcttaaaacaaagctatagtgaaaaaatcaaaatgatttacattgacccgccttacaacacgaaaaacgagaattttatctatggcgatgatttctcgcaatccaatgaagaggttttaaaaacattggattattctaaagaaaaattggattacatcaagaacctttttgggtcaaaatgccatagcgggtggcttagtttcatgtatcccagattgttgctcgctaaagatttgctcaaacaagacggcgtgattttcatttctattgacgataacgaatgcgctcaactcaaacttttatgcgatgaaatttttggggaggggaattttgtggcgtgtttaaaatggaaaaagaaaaaacaaccaagttttttatcaaaagtagccgtaatattagaatatattttagtatatgcaaaagattttagtctaattgataagttaggtttagataatgtatctgatagcgataaacctatcattaatacctctaataatttatcaaaaagatattttaaaaaaggtattagggttaaatctgatttaaattttataaagagtggaaagtatcaaaataagacaatgacgattgaatttatgaatgatatttttattgaaaatggcagaactaaaaatgattttgaatgtataggtaaatttagaacaggacaagaaaatattaatgaatttattgaaaaagatttaatttttataacaaaaaatttagggattagaagagatttattagaagaagagcaatcaaataaaaaaacaattacagatttattaacagaatggggacaaaatcaagatgctactaatgaattaaatattttatttaataattctagcgatgaaagtattttttcaaatcctaaacctacaaaactcatcaaccgattgattgaattatccaccaacgagggcgacatcatcttagacttttttgccgggagcgggacaaccgcgcatgcggtgttagagagtaataagagcgattatcaaaaattaagtgaggggggggggggttatttaatggtttgaacgccgcatttaaagaaaggcgcttcattctcgtc

SEQ ID NO: 390 - protein, 450 aa, Helicobacter pylori
MQNKEIGEEKSVNEKNVEVFNRYFPGCLSIENDNKLTLDTGKLKALLGDFSEIKEEGYGLDFVGKKIALNQAFKKNHKILKPLNESTSKHVLIKGDNLDALKILKQSYSEKIKMIYIDPPYNTKNENFIYGDDFSQSNEEVLKTLDYSKEKLDYIKNLFGSKCHSGWLSFMYPRLLLAKDLLKQDGVIFISIDDNECAQLKLLCDEIFGEGNFVACLKWKKKKQPSFLSKVAVILEYILVYAKDFSLIDKLGLDNVSDSDKPIINTSNNLSKRYFKKGIRVKSDLNFIKSGKYQNKTMTIEFMNDIFIENGRTKNDFECIGKFRTGQENINEFIEKDLIFITKNLGIRRDLLEEEQSNKKTITDLLTEWGQNQDATNELNILFNNSSDESIFSNPKPTKLINRLIELSTNEGDIILDFFAGSGTTAHAVLESNKSDYQKLSEGGGGYLMV

SEQ ID NO: 391 - DNA, 1389 bp, Helicobacter pylori
  CDS (55)...(1344)
gaaacgaataaaaattttccttcacaacatttaaatgcattaaaatacattgaaatgcttttttatatgaaaaatttagagcgcaaaaaattgcaatttggcgctaaaatcgcatgccccaataataacgagcgcttgaaagcgtttatcgcttctttaccctttaaactcacacgcgatcaacaaaacgccattaaagaaatccaaaacgatctcactagctccatagcgtgcaagcgtttgattataggcgatgtggggtgcgggaaaacgatggtgattttagcgagcatggtattaacttacccaaataaaacccttttaatggcgcccacttccattctcgctaaacagctttataacgaagccttaaaatttttacccccttattttgaagtggaattgctgctcggcgggagttacaagaagcgatccaatcatttgtttgaaacaatcacgcatgtggttatcggcacgcaagcgttgttgtttgataagcgcgatttgaatgaattcgctctagtgatcactgatgaacagcaccgatttggcaccaagcagcgctaccaattagaaaaaatggcaagcagtaagggtaataaaccccattctttgcaattttccgctacccccattcctcgcacgctcgccctagccaaaagcgcgtttgtgaaaacgaccatgattagagaaatcccttatcctaaagagattgaaactctagtcttgcataaaagagattttaaaatagtgatggagaaaatcagcgaagaaatcgctaaaaaccatcaagtcattgtcgtctatccgctggtgaatgagagcgaaaaaatcccgtatttatcgctcagtgagggggcgagtttttggcaaaaacgctttaaaaaggtttataccacttcagggcaagataaaaataaagaagaagtgattgaagaatttagagaatccgggagcattcttttagcgactacgctcattgaggtgggcatttctttaccacgattgagcgtgatggtgattttagcgcccgaaaggttaggcttagcgactttacaccagttaagggggcgcgtttctcgtaacggcttgaaaggctattgttttttatgcacgatccaagaagaaaacgaacgattagaaaagtttgctgatgaattggacggctttaaaatcgctgaattggatttagaatacagaaaaagcggggatttactccagggaggggagcagagcgggaatagttttgaatacattgacttagccaaagatgaaaacattatcgctgaagtgaaacgggattttttaaaggccgctagcgtttcacggggaacatttgaaaattgaaaattaaggcagaattgggtaatttaaatcatttaaaaaaag

SEQ ID NO: 392 - protein, 430 aa, Helicobacter pylori
MLFYMKNLERKKLQFGAKIACPNNNERLKAFIASLPFKLTRDQQNAIKEIQNDLTSSIACKRLIIGDVGCGKTMVILASMVLTYPNKTLLMAPTSILAKQLYNEALKFLPPYFEVELLLGGSYKKRSNHLFETITHVVIGTQALLFDKRDLNEFALVITDEQHRFGTKQRYQLEKMASSKGNKPHSLQFSATPIPRTLALAKSAFVKTTMIREIPYPKEIETLVLHKRDFKIVMEKISEEIAKNHQVIVVYPLVNESEKIPYLSLSEGASFWQKRFKKVYTTSGQDKNKEEVIEEFRESGSILLATTLIEVGISLPRLSVMVILAPERLGLATLHQLRGRVSRNGLKGYCFLCTIQEENERLEKFADELDGFKIAELDLEYRKSGDLLQGGEQSGNSFEYIDLAKDENIIAEVKRDFLKAASVSRGTFEN

SEQ ID NO: 393 - DNA, 1463 bp, Helicobacter pylori
  CDS (47)...(1417)
tgttattcctttttcattcaccacttattcacgctataataacgccatggataccaacaacaatattgaaaaagaaatcttggcgctagtcaaacaaaatcctaaagttagtctcatagagtatgaaaattactttagccaactcaaatacaaccctaacgcaagcaagagcgatattgcctttttttatgcccccaaccaagtcttatgcaccacgattacagctaaatacggcgcgttgcttaaagaaattttaagccagaataaagtcggcatgcatttagcccacagcgtggatgtgcgtattgaagtagcgcctaaaatccaaattaacgcccaatctaatatcaattacaaagccataaaaacgagcgtcaaagactcttacacttttgaaaattttgtcgtaggctcatgcaataacaccgtttatgaaatcgctaaaaaagtcgcccaaagcgatacccccccttataacccggtgcttttttatggcggcacagggttaggcaaaacgcacattttaaacgctatcggcaaccatgccctagaaaagcataaaaaagtcgtgttagtcacttcagaagactttttgacagactttttaaagcatttagacaacaaaaccatggattcttttaaagcaaaataccgccattgcgactttttcttgttagatgacgctcaatttttgcaaggaaaacccaagctagaagaagaatttttccacacctttaacgaattgcacgccaacagcaaacaaatcgtattgatttcagaccgatcgcctaaaaacatcgccggcttagaagatcgcttaaaatcgcgctttgaatgggggataaccgctaaagtcatgccccctgatttagaaaccaaactttccattgtcaaacaaaaatgccagctcaatcaaatcactttgcctgaagaggtgatggaatacatcgcccaacacatcagcgacaatatccgccaaatggaaggcgcgatcattaaaatcagcgtgaacgcgaacttgatgaacgcttccattgatttgaacctcgctaaaaccgttttagaagatttgcaaaaagatcatgctgaaggttcaagcttggaaaatatcctactcgctgtcgcgcaaagcctgaatctcaaatccagcgaaatcaaagtctcttcgcgccaaaaaaatgtcgctttggcgaggaaattagtcgtgtatttcgccaggctttatacccctaaccccacgctctcgctcgctcaatttttggatttaaaggatcattcaagcatttctaaaatgtattctggcgttaaaaaaatgcttgaagaagaaaaaagcccttttgtcttaagccttagagaagaaatcaaaaaccgcttgaacgaattgaacgacaaaaaaaccgctttcaattcaagtgaatgaaaaaaggcttatgaaaaagcgtttcattcacttcttttcaaat

SEQ ID NO: 394 - protein, 457 aa, Helicobacter pylori
MDTNNNIEKEILALVKQNPKVSLIEYENYFSQLKYNPNASKSDIAFFYAPNQVLCTTITAKYGALLKEILSQNKVGMHLAHSVDVRIEVAPKIQINAQSNINYKAIKTSVKDSYTFENFVVGSCNNTVYEIAKKVAQSDTPPYNPVLFYGGTGLGKTHILNAIGNHALEKHKKVVLVTSEDFLTDFLKHLDNKTMDSFKAKYRHCDFFLLDDAQFLQGKPKLEEEFFHTFNELHANSKQIVLISDRSPKNIAGLEDRLKSRFEWGITAKVMPPDLETKLSIVKQKCQLNQITLPEEVMEYIAQHISDNIRQMEGAIIKISVNANLMNASIDLNLAKTVLEDLQKDHAEGSSLENILLAVAQSLNLKSSEIKVSSRQKNVALARKLVVYFARLYTPNPTLSLAQFLDLKDHSSISKMYSGVKKMLEEEKSPFVLSLREEIKNRLNELNDKKTAFNSSE

SEQ ID NO: 395 - DNA, 1324 bp, Helicobacter pylori
  CDS (25)...(1260)
tggctaaagcgtaaggagagtttaatggcagagataaaaaaagcgaaaaatttaggcgaatggctggacatgcgtcttggcactaacaagcttgttaaagtgctaatgacagaatattggatccctaaaaacatcaattttttatgggcgatgggggtgattttattaaccctttttggcgtgcttgtggtctcagggattttcttgctcatgtattacaagcctgatgcgaaaatggcgtttgatagcgtgaatttcaccatcatgcaagaagtggcttatggctggctttggcgccacatgcatgccacggcagcgagcatgatttttgtcatcatttatatccacatgtttgttggcatctattatggctcttacaaaaagggtcgtgagatgatttggattagcgggatgattttgtttgtggtctttagcgcggaagcctttagcgggtatatgctgccttgggggcagatgagttattgggccgcagcggttatcacgaatttatttggaggcattcctttcattggggctgatgtggtggagtggattagaggcaattatgttgtggcggattccactttaacgcgctttttcatgctccatgtgtttttactgcccattgcgatcattctacttgttggggtgcatttttattctttacgcatcccgcatgtcaataaccaagaaggcgaagagattgactttgaattagaagagaagaaattcattgaaggcaagaaaaaagaatccaaagtcattcctttttggccggtgttcttgtctaaagatatttttgtggtttgcgcgttcatggtctttttcttttacttggtgtgttaccactatgattttgcgatggatcctatcaactttgaaagggctaacagccttaaaacgccgcctcacatttaccctgaatggtatttcttatggagctatgaagtcttaagaggctttttctttagcgctgatttagggctaatggcctttggcgtggcgcaagtgattttctttttgctacccttcttggatcgaagtccagtggtcgctcctgcgcacaaacggccggcgtttatggtgtggttttggcttgtaatcattgatatgattgttttaacgatctatggtaaattgcctccgcttgggattggtaaatacattggcttagcgggttcaatcacttttttggcccttttctttgtggtattgcccatcatcactatcgctgagagcaagaaacaagggggtgttagatgaaagagtttaagattctaatcatcctcattgtggtggtaggcgtgatttattatggggttga

SEQ ID NO: 396 - protein, 412 aa, Helicobacter pylori
MAEIKKAKNLGEWLDMRLGTNKLVKVLMTEYWIPKNINFLWAMGVILLTLFGVLVVSGIFLLMYYKPDAKMAFDSVNFTIMQEVAYGWLWRHMHATAASMIFVIIYIHMFVGIYYGSYKKGREMIWISGMILFVVFSAEAFSGYMLPWGQMSYWAAAVITNLFGGIPFIGADVVEWIRGNYVVADSTLTRFFMLHVFLLPIAIILLVGVHFYSLRIPHVNNQEGEEIDFELEEKKFIEGKKKESKVIPFWPVFLSKDIFVVCAFMVFFFYLVCYHYDFAMDPINFERANSLKTPPHIYPEWYFLWSYEVLRGFFFSADLGLMAFGVAQVIFFLLPFLDRSPVVAPAHKRPAFMVWFWLVIIDMIVLTIYGKLPPLGIGKYIGLAGSITFLALFFVVLPIITIAESKKQGGVR

SEQ ID NO: 397 - DNA, 462 bp, Helicobacter pylori
  CDS (22)...(429)
caataaagaaaggagcatcagatggcaatctttgataacaataataaatcggctaatgcaaaaacaggaccagcgactatcatcgctcaaggcacaaaaataaagggggagcttcatttagattaccatttgcacgtagatggcgaattagaaggggtggtgcattctaaaagcacggtggtgatcgggcaaaccggctcggtagtgggtgagatttttactaataaattagtggtcagtggcaagttcactggcacggtggaggcggaagtggtagaaatcatgcctttagggcaccttgatggcaaaatctctagccaagagcttgtggtggaaagaaaggggattttgattggggaaactcgccctaagaatattcaagggggggcgttgttaatcaatgagcaagaaaagaaaattgaaaataaatagggaatgatccaatccagcctttatagagcc

SEQ ID NO: 398 - protein, 136 aa, Helicobacter pylori
MAIFDNNNKSANAKTGPATIIAQGTKIKGELHLDYHLHVDGELEGVVHSKSTVVIGQTGSVVGEIFTNKLVVSGKFTGTVEAEVVEIMPLGHLDGKISSQELVVERKGILIGETRPKNIQGGALLINEQEKKIENK

SEQ ID NO: 399 - DNA, 391 bp, Helicobacter pylori
  CDS (13)...(348)
taaggagtttctatggattggggtcgggtcgttcatgtgctgttcagccttatttctttaaccaccattgcagggtttttgtatgagcctaatacggtggtgttgtttgtagcgttagctttaaaccttatttctgttacgcttaaaattggggtgatcaagcgtttcgcttcagagctattggccagctctttagccaccgtattgcatctcataccggcatttgtgtttttacagattttaaataatttggttaccgcttacatgctcatgatcggggcgttgattagcaacgctttcagtctcatctttttgttgattgaaagcgttgtaacgagcgaaacggattaaggggtagtgatggattttatcaatatagaaaaaaaatggc

SEQ ID NO: 400 - protein, 112 aa, Helicobacter pylori
MDWGRVVHVLFSLISLTTIAGFLYEPNTVVLFVALALNLISVTLKIGVIKRFASELLASSLATVLHLIPAFVFLQILNNLVTAYMLMIGALISNAFSLIFLLIESVVTSETD

SEQ ID NO: 401 - DNA, 1035 bp, Helicobacter pylori
  CDS (25)...(993)
gaataaaagagcttaggaggttttatggaattattcaaacgaactagaatcttaagcttcatgcgttattccaattatggggtgatcgtttcagcaattttagcgcttctagcgttggggcttttgtttttcaaagggttttctttagggattgattttgcgggggggagtttggtgcaagtgcgctacactcaaaacgcccccattaaagaagtgcgcgatctgtttgaaaaagaagctcgcttcaaaggcgtgcaagtgagcgaatttggctctaaagaagaaattttaatcaaattcccttttgtagaaacggctgaaaatgaagatctgaacgctatcgtggccaacattctaaaacccagcggcgattttgaaatccgtaaatttgacaccgtgggccctagagtggggagcgaattgaaagagaaaggcattttgtcgctgattttagcattaatagcgatcatggtttatgtgagtttccgctatgaatggcgttttgctttagcgagcgtcattgcgcttgtgcatgatgtgattttagtggcaagctcggtgattgtttttaagattgatatgaatttggaagtgattgcggccttgctcaccttgattgggtattccattaatgatacgatcattatttttgacaggatcagagaagagatgctytctcaaaaaaccaaaaacgccactcaagccattgatgaagccatttctagcacgctcacgcgcacgcttttaacttctttaaccgtgttttttgtggtgttgattttgtgcgtgtttgggagtaagatcatcattggcttttcattgcccatgttaataggcacgattgtagggacttatagctctattttcatcgcccctaaagtggcgttattgttaggctttgatatggataaatattatgagaatgagactagaaaaattaaaaaagctcaagagaaagaaaaaatgcgccgtttgtatgagagcggtcaagtttaaggagtttctatggattggggtcgggtcgttcatgtgctg

SEQ ID NO: 402 - protein, 323 aa, Helicobacter pylori
  VARIANT 217: Xaa = Any Amino Acid
MELFKRTRILSFMRYSNYGVIVSAILALLALGLLFFKGFSLGIDFAGGSLVQVRYTQNAPIKEVRDLFEKEARFKGVQVSEFGSKEEILIKFPFVETAENEDLNAIVANILKPSGDFEIRKFDTVGPRVGSELKEKGILSLILALIAIMVYVSFRYEWRFALASVIALVHDVILVASSVIVFKIDMNLEVIAALLTLIGYSINDTIIIFDRIREEMXSQKTKNATQAIDEAISSTLTRTLLTSLTVFFVVLILCVFGSKIIIGFSLPMLIGTIVGTYSSIFIAPKVALLLGFDMDKYYENETRKIKKAQEKEKMRRLYESGQV

SEQ ID NO: 403 - DNA, 670 bp, Helicobacter pylori
  CDS (56)...(634)
tagctatttctttaaagccgctcttttgtctagcgcaaataaatacaaagcccctatgatcccagaaatcaaagatccgagtaaaatcgcaatttttgccacttccatagcgtctttatgctcgctcgtgaaggccagattagaaataaacatagacatggtaaagccaatccctgctaaaagcccagcccctaaaatatgccaccagctgatgcctttagggcgtgcggtgattttaagcttttcgcttataaaagtgattaagaaaatccctaaaggtttgcccaagcaaagccctaaaataacccctaaaagcaccttatccacttctaaattgatgctagaatcaacgctcaccccagcgtttgcaaacgcgaataagggcatgatgaaatacccgctaatgggggctagaaaatgctccaatctttctaaggggctttgtaaggcgctcgctttttcttcaatagaatgcaagatttcttgctgctctttactcaaaagcgctcctgaactcgtttctgcgtatcgtttgcctagttccaaaagctctacatttttagaatctttagggatcttcaccggtatcataaaagctagaatcactgcagcaatcgtcgcatggataccgctttgatgcacgcaaaaccaaagcaacacccctaaaagc

SEQ ID NO: 404 - protein, 193 aa, Helicobacter pylori
MIPEIKDPSKIAIFATSIASLCSLVKARLEINIDMVKPIPAKSPAPKICHQLMPLGRAVILSFSLIKVIKKIPKGLPKQSPKITPKSTLSTSKLMLESTLTPAFANANKGMMKYPLMGARKCSNLSKGLCKALAFSSIECKISCCSLLKSAPELVSAYRLPSSKSSTFLESLGIFTGIIKARITAAIVAWIPL

SEQ ID NO: 405 - DNA, 1427 bp, Helicobacter pylori
  CDS (19)...(1365)
aagactgcttgaaaaattatgggtctgaaattaaaaattttaaggttgtctatgaatctcaaaaaaacagaaaacgcgctcagtttgacgcttaagaacttcattaaaagcgagtcttttggagggattttcctctttttaaacgctgttttagcgatggtggtggctaattcgtttttaaaagaaagttattttgcactatggcacaccccttttgggtttcaaataggggattttttcatcggctttagtttgcacaactggattgatgatgtcttaatggcgttattctttttaatgataggcttagaaatcaaacgagaattgttgtttggggaattatccagtttcaaaaaagcttcttttcctgtgattgcggccatagggggcatgatagccccaggattgatttatttttttcttaacgctaacacgccttcccagcatggttttgggatccctatggcgacggatattgcgttcgctttaggcgtgatcatgcttttaggcaagagggtgccaaccgctttaaaggtttttttaatcactctagcggtggctgatgacttgggggctattgtggtgatcgcgctcttttataccacgaatttaaaattcgcatggcttttaggggctttaggggtggttcttgttttagccgtattaaaccgcctgaatatgcgctcgctcatcccttacttgcttttaggggtgttgctttggttttgcgtgcatcaaagcggtatccatgcgacgattgctgcagtgattctagcttttatgataccggtgaagatccctaaagattctaaaaatgtagagcttttggaactaggcaaacgatacgcagaaacgagttcaggagcgcttttgagtaaagagcagcaagaaatcttgcattctattgaagaaaaagcgagcgccttacaaagccccttagaaagattggagcattttctagcccccattagcgggtatttcatcatgcccttattcgcgtttgcaaacgctggggtgagcgttgattctagcatcaatttagaagtggataaggtgcttttaggggttattttagggctttgcttgggcaaacctttagggattttcttaatcacttttataagcgaaaagcttaaaatcaccgcacgccctaaaggcatcagctggtggcatattttaggggctgggcttttagcagggattggctttaccatgtctatgtttatttctaatctggccttcacgagcgagcataaagacgctatggaagtggcaaaaattgcgattttactcggatctttgatttctgggatcataggggctttgtatttatttgcgctagacaaaagagcggctttaaagaaatagctaaaaatgctataatttgagattaaaacatcttttaaggaaattaaatgggacaaatt

SEQ ID NO: 406 - protein, 449 aa, Helicobacter pylori
MGLKLKILRLSMNLKKTENALSLTLKNFIKSESFGGIFLFLNAVLAMVVANSFLKESYFALWHTPFGFQIGDFFIGFSLHNWIDDVLMALFFLMIGLEIKRELLFGELSSFKKASFPVIAAIGGMIAPGLIYFFLNANTPSQHGFGIPMATDIAFALGVIMLLGKRVPTALKVFLITLAVADDLGAIVVIALFYTTNLKFAWLLGALGVVLVLAVLNRLNMRSLIPYLLLGVLLWFCVHQSGIHATIAAVILAFMIPVKIPKDSKNVELLELGKRYAETSSGALLSKEQQEILHSIEEKASALQSPLERLEHFLAPISGYFIMPLFAFANAGVSVDSSINLEVDKVLLGVILGLCLGKPLGIFLITFISEKLKITARPKGISWWHILGAGLLAGIGFTMSMFISNLAFTSEHKDAMEVAKIAILLGSLISGIIGALYLFALDKRAALKK

SEQ ID NO: 407 - DNA, 1903 bp, Helicobacter pylori
  CDS (13)...(1857)
aagtaagtgcttatggataataggaatattgatccttacttcaacccagagcaatttttagaaacccaaaaatacaaaggcacggttacagcattaatctttttattgcttttttttatttttttaatggtggcttttaaaaaagctttttttgcccaagccaacatgcctaatctagtgatgagcaaacaagacactgcggctagggggactatctatagtcaagacaactacagcctagccacttcacaaacccttttcaaactgggctttgatacaaggtttttaaacccggataaagaagattttttcattgatttcctttctatttatagcaatatccctaaaaagtccttaaaagacgccatcaatacaaaaggctatatcattctagcctatgatctcacgcccaatatggctgctaatattagagacttaaataagaaatttttagcctttggggtttttcaaaatttcaaagacgcgcacgataaggtgtggcaaaagcaagggctaaacattgaagtgagcggcgtttctaggcattacccttatcaaaatagcctagagccaatcattggctatgtgcaaaaacaagaagaagacaagctcactttaactaccggtaaaaaaggcgttgaaaaatctcaagatcacttgcttaaagcccaacaaaatggcataagaacaggcaaaagagacgtgagttttaactttatccaaaaccactcttatacagaggttgaacgccttgatggctatgaggtgtatttgagcgttcctttaaaactccaaagagaaattgaaaccctattggataaaactaaagacaaactcaaggctaaagaaatcctagtgggtatcattaaccctaaaagcggggaaattttatcgctagcttcaagcaagcgcttcaatcctaatgcgattaaaaccagcgattatgaaagcttgaatttgagcgttgctgaaaaggtttttgagccaggcagcacgatcaaacccattgtttattccttgctgttagacaagaatttgatcaaccccaaagaacgcattgatttaaaccatggctattaccaattaggaaaatacaccattaaagacgactttatccccagtaaaaaagccgttgtggaagacattttgatccaatctagcaatgtgggcatgataaaaatcagtaaaaacttaaacccaaaggatttctataatgggcttttaggctatggattttctcaaaaaaccggcattgatttatctctagaagccacaggaaagatccctcctttgtccgctttcaagcgtgaagtgttaaaggggagcgtttcttatggctatgggctgaacgcgacttttttgcagcttttaagggcttatgcggtgttttctaatgaaggcaaattgactaccccctatttagtgcaacgagaaaccgcccctaatggcgatatttacatccctagccccaaacccacctttcaagtcattagcccaaaaagcgctaggaaaatgaaagaaaccttaatcaaagtagtgcgttatggcacaggcaaaaacgctcaatttgaagggctatacatagggggcaaaaccggcacggctagggtcgctaaaaacgggagttatagcgcgcagtcctacaacagctctttttttgggtttgctgaagatgaaaggcaggtttttactatcggcgtggttatcttaggttcgcatggcaaggaagaatattacgccagcaagattgcagcccccatttttaaagaaatcaccgaaattttagtgcgttacaattatctatcgccctctattgcgattcaaaacgcgctcgagaaaaaccgctttaagataaaataaaaggctcttttcaacccaaactccaaaaaaggagtcttaagtt

SEQ ID NO: 408 - protein, 615 aa, Helicobacter pylori
MDNRNIDPYFNPEQFLETQKYKGTVTALIFLLLFFIFLMVAFKKAFFAQANMPNLVMSKQDTAARGTIYSQDNYSLATSQTLFKLGFDTRFLNPDKEDFFIDFLSIYSNIPKKSLKDAINTKGYIILAYDLTPNMAANIRDLNKKFLAFGVFQNFKDAHDKVWQKQGLNIEVSGVSRHYPYQNSLEPIIGYVQKQEEDKLTLTTGKKGVEKSQDHLLKAQQNGIRTGKRDVSFNFIQNHSYTEVERLDGYEVYLSVPLKLQREIETLLDKTKDKLKAKEILVGIINPKSGEILSLASSKRFNPNAIKTSDYESLNLSVAEKVFEPGSTIKPIVYSLLLDKNLINPKERIDLNHGYYQLGKYTIKDDFIPSKKAVVEDILIQSSNVGMIKISKNLNPKDFYNGLLGYGFSQKTGIDLSLEATGKIPPLSAFKREVLKGSVSYGYGLNATFLQLLRAYAVFSNEGKLTTPYLVQRETAPNGDIYIPSPKPTFQVISPKSARKMKETLIKVVRYGTGKNAQFEGLYIGGKTGTARVAKNGSYSAQSYNSSFFGFAEDERQVFTIGVVILGSHGKEEYYASKIAAPIFKEITEILVRYNYLSPSIAIQNALEKNRFKIK

SEQ ID NO: 409 - DNA, 719 bp, Helicobacter pylori
  CDS (19)...(678)
tagcctagtctttatcgcatgctatttaatgggctatgcttatttgaacaggcaagtttgtgctttagaaaagcgagcgtttcaatgaaaaagctcaaaggtctttttttgatcctgctcttatgggtctatcctttaaggagtgagccaatcaatgagggagcatacattttagaagagattggcgatgtgcttaggtttttgcctatttttgtaggcacggtcagtttggcgatgcgcgattatagagggttaggggaattagcggtcggcacattggttactcaaggcgtgatttatggccttaaaggagcttttagcaacgcccataaagatggggctagagtggaatttgctaaacgcccgtgctgtaattcttggagaggcatgccaagcgggcatgctgggggggtgtttagcgcggctgggtttgtgtattaccgctatgggtggaagccggctcttcctgtgatcgctcttgcaatcctcactgacgctagcagagtggtggcaagacaacacacgatcttgcaagttacgatcggcagccttatcgcatgggggtttgcttatttattcacttcacgctacaaacccaagcaatggatgctctatcctgaaatttctagcgattttaagggcagtagccgctatggggtgagcttttcttatcaatggtaaagggataaagtgctaaaaaaattattattcattgcact

SEQ ID NO: 410 - protein, 220 aa, Helicobacter pylori
MLFNGLCLFEQASLCFRKASVSMKKLKGLFLILLLWVYPLRSEPINEGAYILEEIGDVLRFLPIFVGTVSLAMRDYRGLGELAVGTLVTQGVIYGLKGAFSNAHKDGARVEFAKRPCCNSWRGMPSGHAGGVFSAAGFVYYRYGWKPALPVIALAILTDASRVVARQHTILQVTIGSLIAWGFAYLFTSRYKPKQWMLYPEISSDFKGSSRYGVSFSYQW

SEQ ID NO: 411 - DNA, 1087 bp, Helicobacter pylori
  CDS (34)...(1053)
ttcaagcaaaaacaccacccaaatataaagataatgattttaagcattgaaagttcttgcgatgacagctctttagcccttacaagaatagaggacgctcaactcatcgctcattttaaaatctctcaagaaaagcaccatagttcttatgggggcgttgtgcctgagcttgcatcacgtttgcatgctgagaatttgccgcttttattagaacgcattaaaataagcttgaataaggatttttccaaaattaaagccatcgctatcactaatcagccaggtttgagcgttactttaatagaaggtttgatgatggcaaaagccttgagcttgtctttgaatttgcccttgattttagaagatcatttgagagggcatgtgtattcgctctttatcaatgaaaaacaaacctgcatgcctttaagcgtgctcttagtctctggggggcattctttgattttagaggctagagattatgagaatattaaaatcgttgccacgagtttagacgatagctttggggagagttttgataaggtttccaaaatgcttgatttaggctatccaggaggccctatagtggaaaaattagcccttgattataggcacccaaacgagcctttaatgttccctatccctttaaaaaacagcccgaatctggcttttagtttttcaggtttaaaaaatgcggtgcgtttggaggttgaaaaaaacgcccccaacttgaatgaagcgatcaaacaaaagattggctatcattttcaaagtgcagcgattgagcatttaatccagcagactaaacgctattttaaaatcaaacgccctaaaatttttggcattgtggggggagcgagccaaaatttggctttaagaaaggcgtttgaaaatttgtgcgatgcgtttgattgcaagcttgttttagcccctttagaattttgcagcgacaatgccgccatgatagggcgatccagcctagaagcttatcaaaaaaagcgctttgtccctttagaaaaggctaacatttcgccaagaacgctgttaaaaagttttgagtgaatggatacaaaaagaaagcgcatgataaaac

SEQ ID NO: 412 - protein, 340 aa, Helicobacter pylori
MILSIESSCDDSSLALTRIEDAQLIAHFKISQEKHHSSYGGVVPELASRLHAENLPLLLERIKISLNKDFSKIKAIAITNQPGLSVTLIEGLMMAKALSLSLNLPLILEDHLRGHVYSLFINEKQTCMPLSVLLVSGGHSLILEARDYENIKIVATSLDDSFGESFDKVSKMLDLGYPGGPIVEKLALDYRHPNEPLMFPIPLKNSPNLAFSFSGLKNAVRLEVEKNAPNLNEAIKQKIGYHFQSAAIEHLIQQTKRYFKIKRPKIFGIVGGASQNLALRKAFENLCDAFDCKLVLAPLEFCSDNAAMIGRSSLEAYQKKRFVPLEKANISPRTLLKSFE

SEQ ID NO: 413 - DNA, 547 bp, Helicobacter pylori
  CDS (34)...(498)
tgcacttgttatgatgaagatggcgcactaagaatgaatgaagacttgacaaattcaacagaatataaaagatatggccatgattacgccaaatacccaagaagaatcgctgaagaattgcaacattatgggggcaatagttttgcgaatttttttagagatgaaggggtcttatacaaagagattttgtgcgatgcgtgcgatcatttaaaggttaattacaatgaagaatctgcaacctctttgattgagcaaaacatgctttctaaactcttgaaagatagtttagaaaaaatgagtaggagagagattaaagaactttgcaatgaattgggcatgacaaatattgataaagtgattggtgaaaacaaacaagtcctaatcgcatctactttaacgctgtttaaagcgggtggctctcattcttatgcgttggctgtatctgttgcagatgcaatggtaagacaaactctagggcatgttatgtggtgggtaaagtagcacttaaaaaaactttgggcgttttggctggccctattggttgggt

SEQ ID NO: 414 - protein, 155 aa, Helicobacter pylori
MNEDLTNSTEYKRYGHDYAKYPRRIAEELQHYGGNSFANFFRDEGVLYKEILCDACDHLKVNYNEESATSLIEQNMLSKLLKDSLEKMSRREIKELCNELGMTNIDKVIGENKQVLIASTLTLFKAGGSHSYALAVSVADAMVRQTLGHVMWWVK

SEQ ID NO: 415 - DNA, 523 bp, Helicobacter pylori
  CDS (19)...(486)
ttattttaaaggaatttcatgcaaatcatagaagggaaattgcaattacaagggaatgaaagagtcgctattttaacatcgcgcttcaatcatatcatcacagacagattgcaagaaggggcgatggactgctttaaaaggcatgggggcgatgaggatcttttagacatcgtgctggtgcctggggcttatgaattgccttttattttagacaaattattagagagcgaaaaatacgatggcgtgtgcgttttgggagcgatcattagaggggggactccgcattttgattatgtgagcgcggaagcgactaagggtattgcccatgcgatgcttaaatacagcatgccggtaagctttggcgtgctgaccacggacaatattgaacaagcgattgaaagagcgggcagtaaagccggcaataagggctttgaagcgatgagcaccctcattgaattgttgagcttgtgccaaactctcaagggttaaaatggcgacacgaactcaagccaggggggctgtg

SEQ ID NO: 416 - protein, 156 aa, Helicobacter pylori
MQIIEGKLQLQGNERVAILTSRFNHIITDRLQEGAMDCFKRHGGDEDLLDIVLVPGAYELPFILDKLLESEKYDGVCVLGAIIRGGTPHFDYVSAEATKGIAHAMLKYSMPVSFGVLTTDNIEQAIERAGSKAGNKGFEAMSTLIELLSLCQTLKG

SEQ ID NO: 417 - DNA, 1724 bp, Helicobacter pylori
  CDS (19)...(1656)
tattattaaggatacaaaatggcaaaagaaatcaaattttcagatagcgcgagaaaccttttatttgaaggcgtgagacaactccatgacgctgttaaagtaaccatggggccaagaggcaggaacgtgttgatccaaaaaagctatggcgctccaagcatcactaaagatggcgtgagcgtggctaaagagattgaattaagttgcccggtagctaacatgggcgctcaactcgttaaagaagtagcgagcaaaaccgctgatgctgccggcgatggcacgaccacagcgaccgtgctggcttatagcatttttaaagaaggtttgaggaacatcacggctggggctaaccctattgaagtgaaacgaggcatggataaagccgctgaagccattattaatgagcttaaaaaagcgagcaaaaaagtgggcggtaaagaagaaatcacccaagtggcgaccatttctgcaaactccgatcacaatatcgggaaactcatcgctgacgctatggaaaaagtgggtaaagacggcgtgatcaccgttgaagaagctaagggcattgaagatgaactagatgttgtagaaggcatgcaatttgatagaggctacctctccccttattttgtaacaaacgctgagaaaatgaccgctcaattggataacgcttacatccttttaacggataaaaaaatctctagcatgaaagacattctcccgctactagaaaaaaccatgaaagagggcaaaccgcttttaatcatcgctgaagacattgagggcgaagctttaacgactctagtggtgaataaattaagaggcgtgttgaatatcgcagcggttaaagctccaggctttggggacagaagaaaagaaatgctcaaagacatcgctattttaaccggcggtcaagttattagcgaagaattgggcttgagtctagaaaacgctgaagtggagtttttaggcaaagccggaaggattgtgattgacaaagacaacaccacgatcgtagatggcaaaggccatagccatgatgtcaaagacagagtcgcgcaaatcaaaacccaaattgcaagcacgacaagcgattatgacaaagaaaaattgcaagaaaggttggctaaactctctggcggtgtggctgtgattaaagtgggcgctgcgagtgaagtggaaatgaaagagaaaaaagaccgggttgatgatgcgttgagcgcgactaaagcggctgttgaagaaggtattgtgattggcggcggtgcggctctcattcgcgcggctcaaaaagtgcatttgaatttgcacgatgatgaaaaagtgggctatgaaatcatcatgcgcgccattaaagccccattagctcaaatcgctatcaatgccggttatgatggcggtgtggtcgtgaatgaagtagaaaaacacgaagggcattttggttttaacgctagcaatggcaagtatgtggatatgtttaaagaaggcattattgaccccttaaaagtagaaaggatcgctttacaaaatgcggtttcggtttcaagcctgcttttaaccacagaagccaccgtgcatgaaatcaaagaagaaaaagcggccccagcaatgcctgatatgggtggcatgggcggtatgggaggcatgggtggcatgatgtaagcccccttgctttttagtatcatctgcttttaaaatcccctaaaatcccccctttctaaaatctc

SEQ ID NO: 418 - protein, 546 aa, Helicobacter pylori
MAKEIKFSDSARNLLFEGVRQLHDAVKVTMGPRGRNVLIQKSYGAPSITKDGVSVAKEIELSCPVANMGAQLVKEVASKTADAAGDGTTTATVLAYSIFKEGLRNITAGANPIEVKRGMDKAAEAIINELKKASKKVGGKEEITQVATISANSDHNIGKLIADAMEKVGKDGVITVEEAKGIEDELDVVEGMQFDRGYLSPYFVTNAEKMTAQLDNAYILLTDKKISSMKDILPLLEKTMKEGKPLLIIAEDIEGEALTTLVVNKLRGVLNIAAVKAPGFGDRRKEMLKDIAILTGGQVISEELGLSLENAEVEFLGKAGRIVIDKDNTTIVDGKGHSHDVKDRVAQIKTQIASTTSDYDKEKLQERLAKLSGGVAVIKVGAASEVEMKEKKDRVDDALSATKAAVEEGIVIGGGAALIRAAQKVHLNLHDDEKVGYEIIMRAIKAPLAQIAINAGYDGGVVVNEVEKHEGHFGFNASNGKYVDMFKEGIIDPLKVERIALQNAVSVSSLLLTTEATVHEIKEEKAAPAMPDMGGMGGMGGMGGMM

SEQ ID NO: 419 - DNA, 881 bp, Helicobacter pylori
  CDS (14)...(838)
ctaggaggtttgcatgcaagagtttttaggttttggtgtggtggggaattttgcagggcatttggagcaagcaggagagagtcatagttttattaacatgaaaagcgaagaaaaggacgcccctaaggggctattccctttttatatcccctatgaaaattgttatttggggcgttgttgcattgataaccataagattattttgcctagtgatctagatttaagggtgcaagcagagccagaaatcgctttagaatgcgatgttaaatacgatgaaaaacatttggttgcaaagctcgtgcctaattttttcatggcgtttaatgacgcttctgtgcgcaatttagacgccgcaaaactctcccaaaaaaagaatttttcaccggcttctaaaggtatagggcagaaattgcccattgacaggtttgtttatgggggggtgtgtaacaatttctctatcgcgtcttttttgaaatacaataatgtttggcacatttatggggaaaacagcaaattgctcaaatacgagtttttttatcaaaagcttttagattggattaaagaccaattaaaccaccaacaagatggcgactctttagaggctctaagaccttttttagagcgccataatttccccactaaaatgatttttgcaataggggctaccccttatatgccttttgcgcaagagcattttttgcaaaaaggcgatgaggtggtgatcgttgcttacaaccatttacaatacagttttgaaaagattcaaaacctcttagaagaggacgccctacaagccaaagaacacgctaatctttcttatgtctatcaaatcgtagaatagtaaggcttttacactctttggctttgcttttttacccttt

SEQ ID NO: 420 - protein, 275 aa, Helicobacter pylori
MQEFLGFGVVGNFAGHLEQAGESHSFINMKSEEKDAPKGLFPFYIPYENCYLGRCCIDNHKIILPSDLDLRVQAEPEIALECDVKYDEKHLVAKLVPNFFMAFNDASVRNLDAAKLSQKKNFSPASKGIGQKLPIDRFVYGGVCNNFSIASFLKYNNVWHIYGENSKLLKYEFFYQKLLDWIKDQLNHQQDGDSLEALRPFLERHNFPTKMIFAIGATPYMPFAQEHFLQKGDEVVIVAYNHLQYSFEKIQNLLEEDALQAKEHANLSYVYQIVE

SEQ ID NO: 421 - DNA, 337 bp, Helicobacter pylori
  CDS (40)...(300)
agctccgagtttagcgaattggtttatgggaattttttaatgattatcctgtcagcgagcgtgaagaatttgcgtgaaatttcggttaaagaaaaatttttatggctgaacgctaagtcttatttgatttctgtttttgcgccttttatcttgctcccttggattgatttgttgagcgcttttttattgtatttagggtttttagcgctctttagcgtgctggaattttttgatgaagacattgcagatattatcgtggctaaaagcaaaataaagactaaaaccaaatgttatagagcgtagaatgttagaaaagcttttaagcgctatcaaacaa

SEQ ID NO: 422 - protein, 87 aa, Helicobacter pylori
MIILSASVKNLREISVKEKFLWLNAKSYLISVFAPFILLPWIDLLSAFLLYLGFLALFSVLEFFDEDIADIIVAKSKIKTKTKCYRA

SEQ ID NO: 423 - DNA, 1044 bp, Helicobacter pylori
  CDS (15)...(977)
attaaggggaagtcatggctgatagtttagcgggcattgatcaagttacgagtttgcataaaaataacgagttacaattgttgtgtttcaggctgggtaaaaacaaggatttgtatgcggtcaatgtttttaagatccgtgaagtggtgaaataccatggcaatctcaccatcattagccacgaaaacaattcgctcgttgaggggctaatcattataagagaactcaccattcccttgattgatatgaaaaaatggttttattatgacagccaaaacaaaaacaaggatttacgcccttataggatagaaaaagaaaaaggcgaagatgatattgttatgatttgtgagttttctcgctggactataggggttaggatctatgaagcggataggattttgagcaagaaatggactgaaatggagcaaagcgctgggctagggggatctgcaggcaataacaaactcgtgagccgcacgcgctattttgatgggcgcttggtgcaagtggtggatattgaaaaaatgcttatagacgtgttcccttggattgaagatgaaaaacacaacgatttagagacgctttctaaaatccattctaaccaatgcgttttgcttgctgatgactccccaagcgttttgaaaaccatgcaaatgattttagacaagctgggcgtcaagcatatagattttatcaatggtaaaaccttactagagcatttattcaaccccacaaccgatgtgagtaatattggcctgattattaccgatttggaaatgccagaggcgagcggttttgaagtgatcaagcaggttaaaaacaatcctttgacttcaaaaatccctatcgtggtcaattcttctatgagcgggagttctaatgaagacatggccaggagtttgaaggccgatgatttcatttccaagtctaaccccaaagacatccagcgagtggttaagcaatttttggaattagcatgaaaaaatacagcactatccccaccccttgctacgtgttagagagcgaacgcttagaaaaaaacgc

SEQ ID NO: 424 - protein, 321 aa, Helicobacter pylori
MADSLAGIDQVTSLHKNNELQLLCFRLGKNKDLYAVNVFKIREVVKYHGNLTIISHENNSLVEGLIIIRELTIPLIDMKKWFYYDSQNKNKDLRPYRIEKEKGEDDIVMICEFSRWTIGVRIYEADRILSKKWTEMEQSAGLGGSAGNNKLVSRTRYFDGRLVQVVDIEKMLIDVFPWIEDEKHNDLETLSKIHSNQCVLLADDSPSVLKTMQMILDKLGVKHIDFINGKTLLEHLFNPTTDVSNIGLIITDLEMPEASGFEVIKQVKNNPLTSKIPIVVNSSMSGSSNEDMARSLKADDFISKSNPKDIQRVVKQFLELA

SEQ ID NO: 425 - DNA, 633 bp, Helicobacter pylori
  CDS (37)...(618)
atctgcttaaacacaaaaaagagtaaaataacacgcatgaaaaaattcttatttaaacaaaaattttgtgaaagcctgcccaaaagcttttctaaaactttgttagcgctcagtttgggcttgattttattaggcatttttgcgcctttccctaaagtccctaaacagcctagcgtgcctttaatgtttcatttcaccgagcattatgcgcgctttatccctacgattttatctgtggcgattcccttaatccaaagagatgcggtagggctttttcaagtcgctaacgcttctatcgctacaacccttctcacgcacaccaccaaaagagccttaaaccatgtaacaatcaacgatcagcgtttgggcgagcgcccttatggaggtaatttcaacatgccaagcgggcattcgtctatggtgggtttggcggtggcgtttttaatgcgccgctattcttttaaaaaatacttttggctcttgcccctagtccctttgaccatgctcgctcgcatttatttagacatgcacaccattggcgcggtgctgaccgggcttggcgttggaatgttgtgcgtaasctttttacaagccccaaaaagccttaatcaaaagctttagtttctgttttta

SEQ ID NO: 426 - protein, 194 aa, Helicobacter pylori
  VARIANT 182: Xaa = Any Amino Acid
MKKFLFKQKFCESLPKSFSKTLLALSLGLILLGIFAPFPKVPKQPSVPLMFHFTEHYARFIPTILSVAIPLIQRDAVGLFQVANASIATTLLTHTTKRALNHVTINDQRLGERPYGGNFNMPSGHSSMVGLAVAFLMRRYSFKKYFWLLPLVPLTMLARIYLDMHTIGAVLTGLGVGMLCVXFLQAPKSLNQKL

SEQ ID NO: 427 - DNA, 1091 bp, Helicobacter pylori
  CDS (57)...(1040)
atttccctttgttcgtttatgtttataaagaaagcaaccaggtcagttttatcgccatgatggttgtggtgcttttttgcgttaatggcgctctttttttggcgttaggcttgatctctgcttctttgatgcgttggagtgcgatagtttttagcctgctcaattccgttgctttctatttcattagcgcttataaggtgtttttaaataagagcatgatgggtaatgtcttaaacaccaacacgcatgaagttttaggctttttgagcgtcaaattattcgtttttatcgttgtttttggggtgttgcctggctatgtcatctataaaatcccccttaaaaattcttctaaaaaagcgccctttttagcgatcttggcgttagtgtttatctttatcgctagcgctttagctaacactaaaaattggctgtggtttgacaagcatgcgaaattcatagggggcttaattttgcccttcgcttatagcgtgaacgcttttagagtgagcgctctcaaatttttcgcccccaccatcaagccgctccctcttttttcacccaatcattcccattcgtttgtggtgctagtcattggcgaaagcgctaggaaacataattacgccctttatggctatcaaaaacccaccaccccaagactaagcaagcgtttagccgataatgaactcactcttttcaacgccacttcttgcgccacttacacgacagcgagtttggaatgcattttagattcttcttttaaaaacaacgcttatgaaaatttgccaacttacttgactaaagccggtatcaaagtcttttggtatagcgcgaacgacggcgaaaagaatgttaaggttacaagctatcttaaaaactatgaattgattcaaaaatgccccaattgtgaagcgatcgctccttatgatgaatctttactttataatttgcctgaccttttaaaagaacactctaatgaaaatgtcttgctcatcttacacttgcaggctcgcatggcccaaactacgacaacaaagtgcctttaaattttagggtgtttaagccttattgctcaagcgctgatctgtcttctt

SEQ ID NO: 428 - protein, 328 aa, Helicobacter pylori
MMVVVLFCVNGALFLALGLISASLMRWSAIVFSLLNSVAFYFISAYKVFLNKSMMGNVLNTNTHEVLGFLSVKLFVFIVVFGVLPGYVIYKIPLKNSSKKAPFLAILALVFIFIASALANTKNWLWFDKHAKFIGGLILPFAYSVNAFRVSALKFFAPTIKPLPLFSPNHSHSFVVLVIGESARKHNYALYGYQKPTTPRLSKRLADNELTLFNATSCATYTTASLECILDSSFKNNAYENLPTYLTKAGIKVFWYSANDGEKNVKVTSYLKNYELIQKCPNCEAIAPYDESLLYNLPDLLKEHSNENVLLILHLQARMAQTTTTKCL

SEQ ID NO: 429 - DNA, 1879 bp, Helicobacter pylori
  CDS (49)...(1827)
aagctcaaagataaagcgctacaatctcgcttagaaaaaggacacaaaatgctattgaattacgattttttagaatttgttgatgagccgaaaagaaacacttctttgacagcatctattgataaagcgttagcggacaggaagttagctagacaaaataaacctagcgttagggtgcttggtaaggcgatgcccttaagcaagtttttagatgctgttggcgatgaaatctcacgacttaaatatgatatgagccacaagactattaaaggctctacaattgagagttctaatcttatcagcatttataaaaagattgcgagcggactaccttttgggactatctcggcgtttagaccttttaaagacgctttttataaagactttaccgaaaaagaacaaaacgctctaatctatgcttataagagcggagcagaccctaaaaatgcggacataatagccaaatattggttaagtcaatctgtggatttagacccatacgaccctattaaagttgtagatttctttcacccacaacctgaaaatggtaaagagactacaaaatttaagaactacaaagataggattgagaacatttatgcgacactctataacacattgggtaggggttatgtggataaattttttaaaaaagaagccacaatgagggactttatgtctagcgataaatttgttgagagataccgctacactagaaaagaaaatatggcaaggacacaagcattaaaagacataatgaatattgacagagatttcattggttatattgaagtgttagggtattggaaagacaaccctaaagacaatatcttaccagacaaagaggttagcttttttgtattccaaaacgaacctagtagcacatttgatttgaaaaaccacttattgatatggggtaaacaattcagacaagtagcgatttgctatggcggacaattgattgctaataagaataagacttataggatagatttgataagttgcagacctgataattttggtgaggtttgggctaaattcacagggattaaattttcagttcctagcgacttaccacaagctctcacacgcataaatgacagcgtttatacttttctctctaggaataaagagggtatcggtcttaataaactcgctctcaataaagtcgttaagacagaattaaaagcgacttgtatgccctatgattactctaaattgggtatagagactattggcgaggacattagaagcaatattaaagcattacagaaaatgtctcgtgggtatggacaccctaaagagttctttttggacgcaatgataaaaaaacaggaaaatgcgattaaacgcatagaagcacgaaaatgtgcggtaagcgatgacttcaaacaaggtatgaaacgaaacattaaagttaataaccttgttaaagctatgcgacaaggcaaaaaagtgagtaggacattgattgctaaagtgcttgctaacaccatagacaccgatgcgggttattgcttcatttcgccgacagatttagcgacacaacttggcaacatcagccctagactatctaaaagcatagttaccgccatagagcaagcagagggcgtgagactgaattatgcgttgattgacaaaatcacctataactcactccacaatatcttaagtttcatttttgatattgataaccctttaagcgaccaagtgtttgagagattagtcattgaagtcccaagagaagcacttaaaaatgtgaagttgccacaaatcaaaaatgtattgacttctcaaatctttgatggcgcttaccactttaaaagttaaaccatgctctttatcagcgcaactaacacgaatgccggaaaaaccacat

SEQ ID NO: 430 - protein, 593 aa, Helicobacter pylori
MLLNYDFLEFVDEPKRNTSLTASIDKALADRKLARQNKPSVRVLGKAMPLSKFLDAVGDEISRLKYDMSHKTIKGSTIESSNLISIYKKIASGLPFGTISAFRPFKDAFYKDFTEKEQNALIYAYKSGADPKNADIIAKYWLSQSVDLDPYDPIKVVDFFHPQPENGKETTKFKNYKDRIENIYATLYNTLGRGYVDKFFKKEATMRDFMSSDKFVERYRYTRKENMARTQALKDIMNIDRDFIGYIEVLGYWKDNPKDNILPDKEVSFFVFQNEPSSTFDLKNHLLIWGKQFRQVAICYGGQLIANKNKTYRIDLISCRPDNFGEVWAKFTGIKFSVPSDLPQALTRINDSVYTFLSRNKEGIGLNKLALNKVVKTELKATCMPYDYSKLGIETIGEDIRSNIKALQKMSRGYGHPKEFFLDAMIKKQENAIKRIEARKCAVSDDFKQGMKRNIKVNNLVKAMRQGKKVSRTLIAKVLANTIDTDAGYCFISPTDLATQLGNISPRLSKSIVTAIEQAEGVRLNYALIDKITYNSLHNILSFIFDIDNPLSDQVFERLVIEVPREALKNVKLPQIKNVLTSQIFDGAYHFKS

SEQ ID NO: 431 - DNA, 1063 bp, Helicobacter pylori
  CDS (13)...(1014)
tgctaaattgtgatgtttcacaaagcccttattacctttatcgttctatggttttttttgaatggcttaggggcttatgatttcaagcattgtcaagcgttttttaaaaaagcgagccttcaaaaaggaggcgtggctttaaaagaattgcctaaaggcgtgtatttgtattattccaaaacctatcccaaacacgccaaagtcatcaaatccgatccctttgtagggttgtatttgttgcaaagcgcaccaagcgagtatgtttataccttaagggatttagacaaagacgcccttataaggccaatggctagcataggggataaagaagccctagaaacgcgattattggtggggcaaagaggctatgagcgctacgctcaaatttcgcaaaagactcaaaaaaatggcgttatcagcaatatttgctatcaaatgttagggctaggggtaggggggaatggctttatagaaacgaaatttatcaagcgctttttaaaccagcaagagccttattatggggatattggggtgcgtttagaagaacatcataagcgtttagtggtagtgcaatttgatccatttttccctaaaaacccttttttaaaaaacgatgaaatcctagcgatcaaccatcaaaagatccactcattagcggagtttgaatgggtggtgagcaatcttaaataccaaagccttgcaaaagtggaaatcaaacgaaaccataaagtcaaagaagtaacgctcaaagtcaataagcgttatggggggtttttactcaaagacacttttttagagcgctatggcatcgctttagatgagcgttttattatcactaaaataggcgctcatttgcccaaaggcttggattttttaaagcttggggataggattttatgggtgaattataaaagcgtggcgtccaacccaaaggctttaagagaagcgttaagcgcgcctaaaattgaattattagtcttgcgtaaaggctttgaattttacattaaagtccgttgaagtattgatgaaaaatgacgcttatgaaattattctttcttggttt

SEQ ID NO: 432 - protein, 334 aa, Helicobacter pylori
MFHKALITFIVLWFFLNGLGAYDFKHCQAFFKKASLQKGGVALKELPKGVYLYYSKTYPKHAKVIKSDPFVGLYLLQSAPSEYVYTLRDLDKDALIRPMASIGDKEALETRLLVGQRGYERYAQISQKTQKNGVISNICYQMLGLGVGGNGFIETKFIKRFLNQQEPYYGDIGVRLEEHHKRLVVVQFDPFFPKNPFLKNDEILAINHQKIHSLAEFEWVVSNLKYQSLAKVEIKRNHKVKEVTLKVNKRYGGFLLKDTFLERYGIALDERFIITKIGAHLPKGLDFLKLGDRILWVNYKSVASNPKALREALSAPKIELLVLRKGFEFYIKVR

SEQ ID NO: 433 - DNA, 1133 bp, Helicobacter pylori
  CDS (52)...(1104)
tagtcttgcgtaaaggctttgaattttacattaaagtccgttgaagtattgatgaaaaatgacgcttatgaaattattctttcttggtttatcacgcctctcacggcgattttagggcgtttcgctgaattttttctctacactttgcatgcgcaattggtgtttaatagcgtggtcgctttggcgttcatgctctttgcttataggagtttgaaagaacagaatttcttcagcgctagcgcgctaacagaagcgttattgtttgtggggttttttgcacttttcaactacgctttaaaaaatcccatgcatttttatgaatttttccaaaacgctatttttattgcgcctaacatgatcgcgcaaagcctctctcaaagcttgagtaacttttctgaccatgcgctttctttagattttatctttaatcatggtttttatgcccttagtttcatcagcgatttgagccataatgaaatgtctgtgtggctttttttaagcgttttgcaagggctttttttgagcgtgctgtttgcaatcatcattttagtgtatttagaagtgcatgtgtggtgctctttaggggtgctgtttttagcgtttgggttttttaaaacctggaggagcgttgtggttatatgcctaaaaaagtgcttcgctcttgggttttacaagccttttttgttgttggtagggtttttgaatgtgtcggttactaaggctttaatagacgctcatatgcaagaaaaacaagacttaagccttttattggtggtagcgttatttttgtgttgcgtttttatcatcggcgtgccttttttcatcaacgctttgtttagggtgcaaaacagccttaaagaaacttacaaactcgccaccaatttgagtgccaacctcagccaaaacgcccttaattccttacaatacatcacgaccccacccgcttcttctagcgtttcttcttctatgagtgaaagcgtctctaaagaaaaagaaacgcattcccccacatttaaggtagaaaccactcaattagatgtaaaaatcccaaatttcaagcaaaaaaaggttaaaaaggatacaataaatacaaaaaatgaaatttaaataaataggaatttaatgagaatttt

SEQ ID NO: 434 - protein, 351 aa, Helicobacter pylori
MKNDAYEIILSWFITPLTAILGRFAEFFLYTLHAQLVFNSVVALAFMLFAYRSLKEQNFFSASALTEALLFVGFFALFNYALKNPMHFYEFFQNAIFIAPNMIAQSLSQSLSNFSDHALSLDFIFNHGFYALSFISDLSHNEMSVWLFLSVLQGLFLSVLFAIIILVYLEVHVWCSLGVLFLAFGFFKTWRSVVVICLKKCFALGFYKPFLLLVGFLNVSVTKALIDAHMQEKQDLSLLLVVALFLCCVFIIGVPFFINALFRVQNSLKETYKLATNLSANLSQNALNSLQYITTPPASSSVSSSMSESVSKEKETHSPTFKVETTQLDVKIPNFKQKKVKKDTINTKNEI

SEQ ID NO: 435 - DNA, 777 bp, Helicobacter pylori
  CDS (50)...(748)
ccctttcaaacaaggccctaaaaattacgaagaaaacctgattttccccatggataaccctaaaggcattgatggttttactaaccttaaagaaaaagacatcgccactaatgaaaataagcttttacgcaccattacagcggataaaatgatacccgcctttctcatcacgcctatttctagccagatcgctggtaaagtcatcgcgcaggtggagagcgatatttttgctcacatgggcaaggccgtcttaatccccaaaggctctaaagtcataggttattacagcaacaataacaaaatgggcgaataccgcttggatattgtatggagccgcatcatcactccccatggcatcaatatcatgctcactaacgctaaaggggcggacattaaaggctataacggcttggtgggggaattgattgaaaggaatttccagcgctatggcgtgccgttactgctttctactctcactaacggcctattgattgggatcacttcggctttaaacaacagaggcaataaagaaggagccaccaatttctttggggattatcttttaatgcaattgatgaggcaaagcggcatggggatcaatcaagtagtcaatcaaattttaagagataagagcaaaatcgctcctattgtggtgattagagaagggagtagggtcttcatttcgcccaatactgacatctttttccctatacccagagagaatgaagtcatcgctgagtttttgaagtgactcaaaaatccccaattaaaaacgct

SEQ ID NO: 436 - protein, 233 aa, Helicobacter pylori
MDNPKGIDGFTNLKEKDIATNENKLLRTITADKMIPAFLITPISSQIAGKVIAQVESDIFAHMGKAVLIPKGSKVIGYYSNNNKMGEYRLDIVWSRIITPHGINIMLTNAKGADIKGYNGLVGELIERNFQRYGVPLLLSTLTNGLLIGITSALNNRGNKEGATNFFGDYLLMQLMRQSGMGINQVVNQILRDKSKIAPIVVIREGSRVFISPNTDIFFPIPRENEVIAEFLK

SEQ ID NO: 437 - DNA, 1229 bp, Helicobacter pylori
  CDS (27)...(1169)
aaataaaattcaataaaggaaaaataatgaaagaaaaaatcgctttaatcaccggggttaccgggcaagacgggagctatctggctgaatacttgctgaatttgggttatgaagtgcatgggttaaaaaggcgctcttctagcatcaacacttctaggatcgatcatctgtatgaagatttgcatagcgatcataaaaggcgttttttcttacactatggggatatgaccgatagctctaatcttatccatttaatcgctaccactaagcctacagagatttataatttagccgctcaaagccatgtaaaagtctcttttgaaacccccgaatacaccgctaacgctgatggtattggcacgctaaggattttagaagccatgcggattttaggattagaaaagaaaacgcgcttttatcaagccagcacgagcgaattgtatggcgaagtcttagaaaccccgcaaaatgaaaacaccccctttaacccacgaagcccctatgcggtcgctaaaatgtatgccttttacatcaccaaaaattacagagaggcctataacttgtttgcggttaatggcattctttttaaccatgagagcagggtaaggggcgaaacttttgtaacccgtaaaatcacacgagccgctagcgcgatagcgtataacttaacggattgcttgtatttagggaatttagacgctaaaagagactgggggcatgccaaagattacgtgaaaatgatgcatttaatgctccaagcgcccatcccacaagattatgtgatcgccacaggaaagaccacaagcgtgcgcgattttgtgaaaatgagctttgaatttatcggtatcaatttagaatttcaaaatacagggattaaagaaatcggtttgattaaaagcgttgatgaaaaaagagcgaacgctttaaaattgaacttaagccatttaaaaaaaggccaaatcgtggtgcgcatagacgagcgttatttcaggcctaccgaagtggatttgcttttaggcgatcccactaaggcagagaaagagctagactgggttagggaatacgatttaaaagagttggttaaggacatgttagaatacgatttaaaagaatgccaaaaaaacctttacttgcaagatgggggttatattttaaggaatttttatgaatgagattattttaatcactggtgcctatggcatggtggggcagaacacggcgttgtattt

SEQ ID NO: 438 - protein, 381 aa, Helicobacter pylori
MKEKIALITGVTGQDGSYLAEYLLNLGYEVHGLKRRSSSINTSRIDHLYEDLHSDHKRRFFLHYGDMTDSSNLIHLIATTKPTEIYNLAAQSHVKVSFETPEYTANADGIGTLRILEAMRILGLEKKTRFYQASTSELYGEVLETPQNENTPFNPRSPYAVAKMYAFYITKNYREAYNLFAVNGILFNHESRVRGETFVTRKITRAASAIAYNLTDCLYLGNLDAKRDWGHAKDYVKMMHLMLQAPIPQDYVIATGKTTSVRDFVKMSFEFIGINLEFQNTGIKEIGLIKSVDEKRANALKLNLSHLKKGQIVVRIDERYFRPTEVDLLLGDPTKAEKELDWVREYDLKELVKDMLEYDLKECQKNLYLQDGGYILRNFYE

SEQ ID NO: 439 - DNA, 1116 bp, Helicobacter pylori
  CDS (70)...(1065)
cagcagtatccctatcggtcaagccttaatggcgtatttcaaccctacaatcatcaaaaaaggataaaaatggatagcgtaactctagcatgcgggaacggagggaaagaaacaaacgctttgattgagcgagtctttatgccctatttaaaagaatggattgttgcatttgatgaagacgcccctaaatttgaagctagtggggaatattgcgtgagcacggatagttttgtcatcacgcccttaatttttaatgggggcgatataggcaagctttgcgtttgcgggagtgcgaatgatgtgagcgtgcaagggggcgaacctttgtatttgaatatgggttttattttagaagaaggcttagaaatttctcttttaaaacaaattttacaatccatacaaaaagaattgtttaaagccaacctgaaactcctctccctagacactaaagtcgtgccaaaggggagcgtggataagctttttatcaacacaacctgcattggtaaaatcatcaagccagggatttcttcgtaccatttacaacaagggcaagccattatcctaagcgacactatcgccaatcatggggcaagcttatttgcgatgcgtaatgaaatcaagcttaaaacgaatctagaaagcgattgccaactgctctatcccttattaaaacccctatttttaagcgatctcaaaattgatgctttaagagatgcgactaggggcgggttagcgagcgtgctgaacgaatgggcgaacagctctagagtgaaaatcgttatagaagaagaaaaaatccccttaaaagaagaaacgaaagggatttgtgagattttagggttagaaccctacgcgctagccaatgagggggtgtttgttttagcgctcaatcaaaaagacgcccctaaagccttagaaattttaaaaagtaacgaaaaagctaaaaacgcttgcgtgattggcaaagtgtttgaaaacccttatcctagcgtggttttaaagaacgcatggggttttgaaaggattttagaggtgccagagggcgaattattgcctaggatttgttaacacgccgtcattttttaatcgttttaagcctgccctaaaaatggttta

SEQ ID NO: 440 - protein, 332 aa, Helicobacter pylori
MDSVTLACGNGGKETNALIERVFMPYLKEWIVAFDEDAPKFEASGEYCVSTDSFVITPLIFNGGDIGKLCVCGSANDVSVQGGEPLYLNMGFILEEGLEISLLKQILQSIQKELFKANLKLLSLDTKVVPKGSVDKLFINTTCIGKIIKPGISSYHLQQGQAIILSDTIANHGASLFAMRNEIKLKTNLESDCQLLYPLLKPLFLSDLKIDALRDATRGGLASVLNEWANSSRVKIVIEEEKIPLKEETKGICEILGLEPYALANEGVFVLALNQKDAPKALEILKSNEKAKNACVIGKVFENPYPSVVLKNAWGFERILEVPEGELLPRIC

SEQ ID NO: 441 - DNA, 1033 bp, Helicobacter pylori
  CDS (16)...(1005)
aaaaggatattttgaatgaaaagaatgttagcggagtttgaaaaaatccaagcgattctaatggctttcccccatgagtttagcgactgggcgtattgtatcaaagaggctagggaaagttttttaaacatcattcaaaccatagccaaacacgctaaagtgctagtgtgcgtccacactaacgatattatcggttatgaaacgcttaaaaacttacccggtgtagagatcgcaaggattgacactaacgacacatgggctagggattttggagcgatcagcgttgaaaatcatggcgttttagagtgcttggattttggctttaatggctgggggttaaaatacccgtccaatttagacaatcaagtgaatttcaaactcaaaagtttagggtttttaaaacaccctttaaaaacgatgccctatattttagagggcgggagtatagaaagcgatggggctgggagcgttttaaccaacacccaatgcctgttagaaaaaaatcgtaacccccatttgaatcaaaatggaatagaaaacatgcttaaaaaggaattaggggctaaacaagtgctgtggtattcttatggctatctcaaaggcgatgataccgatagccataccgacacgctcgctcgttttttagataaagacaccattgtttatagcacatgcgaagatgaaaacgatgagcactacacagccttaaaaaaaatgcaagaagaattaaaaacctttaaaaaactagacggcacgccctataaactcatccccctagaaatccctaaagccatttttgatgaaaaccaacaacgcttgccggcaacttatgtgaattttttattgtgcaataacgctttaatcgtgcccacttacaacgaccctaaagacgcgctcattttagaaaccttgaaacaacacacgcccttagaagtgataggggttgattgcaacaccttaatcaaacagcatggaagtttgcattgtgtaacgatgcaactttattgaacaaaatcacgctttttggcgtggt

SEQ ID NO: 442 - protein, 330 aa, Helicobacter pylori
MKRMLAEFEKIQAILMAFPHEFSDWAYCIKEARESFLNIIQTIAKHAKVLVCVHTNDIIGYETLKNLPGVEIARIDTNDTWARDFGAISVENHGVLECLDFGFNGWGLKYPSNLDNQVNFKLKSLGFLKHPLKTMPYILEGGSIESDGAGSVLTNTQCLLEKNRNPHLNQNGIENMLKKELGAKQVLWYSYGYLKGDDTDSHTDTLARFLDKDTIVYSTCEDENDEHYTALKKMQEELKTFKKLDGTPYKLIPLEIPKAIFDENQQRLPATYVNFLLCNNALIVPTYNDPKDALILETLKQHTPLEVIGVDCNTLIKQHGSLHCVTMQLY

SEQ ID NO: 443 - DNA, 449 bp, Helicobacter pylori
  CDS (73)...(408)
gctttattcaaaagagcgaggagtttagacgagatagcaaaatcatcaatctttatcgcctttcaacgcctaatgtttgcagtgcatgctgcgatgattacgacattaaagaaagaagttttctttctttacctttatatcaaatcactcaaaatcccgattcctactacactgaaatacatgatttctttaggcaaaatcagagaattagatgttttagcaaatcttgctaaactttgccctacttgtcatagggctttaaaaaaaggatctagcgaagaggagtttcaaaaacgcttgattagaaacattctcaatcgcaataaagacaatttagagtttgcgcaattgcgttttgaaaccgatgatttttcaacgcttattgatcgtatttgtgaaagcttgaaatgaattataaaattttagatttattttgtggggctgggggt

SEQ ID NO: 444 - protein, 112 aa, Helicobacter pylori
MFAVHAAMITTLKKEVFFLYLYIKSLKIPIPTTLKYMISLGKIRELDVLANLAKLCPTCHRALKKGSSEEEFQKRLIRNILNRNKDNLEFAQLRFETDDFSTLIDRICESLK

SEQ ID NO: 445 - DNA, 420 bp, Helicobacter pylori
  CDS (25)...(375)
aaaaactggaatcaaggggttaaaatgttttctcatgaagtttatttggagggttgcacccttgaattaagaaagatttgcgatgattttgaaaaaaatgccatgcaagatgatttagggcagaaactcaggagtgatgtgctagaggacatgctaaaaatcgcgcatgatttagaaaatttagaagatgacacccaataccaaagaagaataattgacgagcaaattgaagaagccaaatctttgatgaggcaaattgatatgaatttccatccatcaagcgagatcgataggcttatgcgtgaagccaaagagcatgaaagagaagctagtaaaagatatgatgagtatcttaaatctaaggataaaaatgattgatgtgaatggtttattaaaagaactggatgatgccttagataa

SEQ ID NO: 446 - protein, 117 aa, Helicobacter pylori
MFSHEVYLEGCTLELRKICDDFEKNAMQDDLGQKLRSDVLEDMLKIAHDLENLEDDTQYQRRIIDEQIEEAKSLMRQIDMNFHPSSEIDRLMREAKEHEREASKRYDEYLKSKDKND

SEQ ID NO: 447 - DNA, 651 bp, Helicobacter pylori
  CDS (43)...(627)
ggtgcgtttgttgtaaaaatttttgtttggaaggaaaaggcaatgctaggacttgtattgttatatgttgggattgttttaatcagcaatgggatttgcgggttaaccaaagtcgatcctaaaagcactgcggtgatgaacttttttgtgggcggactttccattatttgtaatatagttgtcatcacttattctgcactccaccctacagcccctgtagaaggtgctgaagatattgctcaagtatcgcaccatttgactagtttctatggaccagcgactgggttattgtttggtttcacctacttgtatgcggctatcaaccacacttttggtttggattggaggccctactcttggtatagcttattcgtagcgatcaacacgattcctgctgcgattttatcccactatagcgatatgcttgatgaccacaaagtgttaggcatcactgaaggcgattggtgggcgatcatttggttggcttggggtgttttgtggcttaccgctttcattgaaaacatcttgaaaatccctttagggaaattcactccatggcttgctatcattgagggtattttaaccgcttggatccctgcttggttgctctttatccaacactgggtgtgagatgatcatagagcgtttagt

SEQ ID NO: 448 - protein, 195 aa, Helicobacter pylori
MLGLVLLYVGIVLISNGICGLTKVDPKSTAVMNFFVGGLSIICNIVVITYSALHPTAPVEGAEDIAQVSHHLTSFYGPATGLLFGFTYLYAAINHTFGLDWRPYSWYSLFVAINTIPAAILSHYSDMLDDHKVLGITEGDWWAIIWLAWGVLWLTAFIENILKIPLGKFTPWLAIIEGILTAWIPAWLLFIQHWV

SEQ ID NO: 449 - DNA, 526 bp, Helicobacter pylori
  CDS (48)...(482)
gaagggcatttgtgctaaaaaccactaaaaaaagcctgttggtttttatgggggtttttttccttatttttggcgtggatcaagcgattaaatacgctattttagaagggtttcgctatgaaagtttgatgatagatattgttttagtgttcaataaaggcgtggcgttttccttgctcagttttttagaggggggtttgaaatacttgcaaatccttttgattttagggctttttatctttttaatgcgccaaagggagctttttaaaaaccatgcgatagagtttggcatggtgtttggcgccggggtttctaatgttttagaccggtttgtgcatgggggcgtggtggattatgtgtattatcattatggctttgattttgccatttttaatttcgctgatgtcatgatagatgtgggcgtgggcgttttattgttgaaacaattcttttttaagcaaaaacaaaacaaaattaaggcataatcactctttttaaaatgaaaggtcgcgtagctcagttggta

SEQ ID NO: 450 - protein, 145 aa, Helicobacter pylori
MGVFFLIFGVDQAIKYAILEGFRYESLMIDIVLVFNKGVAFSLLSFLEGGLKYLQILLILGLFIFLMRQRELFKNHAIEFGMVFGAGVSNVLDRFVHGGVVDYVYYHYGFDFAIFNFADVMIDVGVGVLLLKQFFFKQKQNKIKA

SEQ ID NO: 451 - DNA, 1392 bp, Helicobacter pylori
  CDS (22)...(1356)
tttaaaaggtattttataacgatgaaaatttttgggactgatggcgtgaggggtaaagcaggggtgaaactcacccccatgtttgtgatgcgtttaggcattgctgccggattgtattttaaaaaacattctcaaacgaataaaattctaatcggtaaagacaccagaaaaagcggctatatggtagaaaacgctttagtgagcgctctaacttccataggctataatgtgattcaaatagggcctatgcccacccctgcgattgcgtttttaactgaagacatgcgctgtgatgcgggtattatgataagcgcgagccacaacccttttgaagataatggcattaagtttttcaattcttatggctataagcttaaagaagaagaagaaaaagcgattgaagaaatctttcatgatgaagaattactgcattctagctataaagtgggtgagagcgtcggtagcgctaaaaggatagacgatgtcatagggcgctatattgcacatttaaaacactctttccccaaacatttgaatttacagagtttaaggatcgtgctagatacggctaatggcgcggcttataaggtggctccggtcgtttttagcgagcttggggctgatgtgttagtgattaatgatgagcctaacgggtgtaacattaatgatcaatgcggggctttacaccccaaccaattaagccaggaagtgaaaaaataccgcgcagatttaggctttgcttttgatggcgatgctgacaggctagtggtggtggataatttagggaatatcgtgcatggggataagcttttaggggtgttaggggtttatcaaaaatctaaaaacgccctttcttctcaagcggttgtcgccacaaacatgagcaatttagcccttaaagaatatttaaaatcccaagatttggaattgaagcattgcgcgattggggataagtttgtgagcgaatgcatgcaattgaataaagccaattttggaggcgagcaaagcgggcatatcatttttagcgattacgctaaaacaggcgatggtttggtgtgcgctttgcaagtgagcgcgttagtgttagaaagcaagcaggtaagctctgttgcgttaaacccctttgaattatacccccaaagcctagtgaatttgaatgtccaaaaaaagccccctttagaaagcctgaaaggttatagcgctcttttaaaagaattagacaagctagaaatccgccatttgatccgttatagcggcactgaaaacaaattgcgaatccttttagaagctaaagatgaaaagcttttagaatccaaaatgcaagaattaaaagagttttttgaagggcatttgtgctaaaaaccactaaaaaaagcctgttggtttttatgg

SEQ ID NO: 452 - protein, 445 aa, Helicobacter pylori
MKIFGTDGVRGKAGVKLTPMFVMRLGIAAGLYFKKHSQTNKILIGKDTRKSGYMVENALVSALTSIGYNVIQIGPMPTPAIAFLTEDMRCDAGIMISASHNPFEDNGIKFFNSYGYKLKEEEEKAIEEIFHDEELLHSSYKVGESVGSAKRIDDVIGRYIAHLKHSFPKHLNLQSLRIVLDTANGAAYKVAPVVFSELGADVLVINDEPNGCNINDQCGALHPNQLSQEVKKYRADLGFAFDGDADRLVVVDNLGNIVHGDKLLGVLGVYQKSKNALSSQAVVATNMSNLALKEYLKSQDLELKHCAIGDKFVSECMQLNKANFGGEQSGHIIFSDYAKTGDGLVCALQVSALVLESKQVSSVALNPFELYPQSLVNLNVQKKPPLESLKGYSALLKELDKLEIRHLIRYSGTENKLRILLEAKDEKLLESKMQELKEFFEGHLC

SEQ ID NO: 453 - DNA, 483 bp, Helicobacter pylori
  CDS (19)...(441)
ttttatcaaaggattcttatgacaaagaccgctaaagtcaatgacatcgttcgtgattgggtcgttttagacgccaaagacaaggtttttggccgcttgatcactgaaatcgctgtgcttttaagagggaaacaccgccctttttacacccctaatgtggattgtggggattttgtggtggttatcaacgctaataaggttaaattttcaggcatgaaattagaggataaagagtattttacccattcaggctattttggcagcactaagagcaagactctccaagaaatgctagaaaaagcccctgaaaagctctaccacttagccgttaggggcatgctccctaaaacgaaattagggaaagcgatgattaaaaaactcaaagtttatcgtgatgataagcaccctcacaccgcacaaactagcaaaaaggacgctaaatgagaaaaatctatgctaccggtaaaagaaaaaccgctatcg

SEQ ID NO: 454 - protein, 141 aa, Helicobacter pylori
MTKTAKVNDIVRDWVVLDAKDKVFGRLITEIAVLLRGKHRPFYTPNVDCGDFVVVINANKVKFSGMKLEDKEYFTHSGYFGSTKSKTLQEMLEKAPEKLYHLAVRGMLPKTKLGKAMIKKLKVYRDDKHPHTAQTSKKDAK

SEQ ID NO: 455 - DNA, 2107 bp, Helicobacter pylori
  CDS (19)...(2058)
tagcttttgattgaaagcatgggttcttactttatggagtgtccaatgaaaaagaaagctaacgaagaaaaagcccaaaaaagagctaaaacagaagccaaagcagaagccacacaagaaaataaaactaaagaaaacaataaagccaaagaaagcaaaattaaagaaagcaaaatcaaagaagctaaagcgaaagaacctattcctgttaaaaagcttagttttaatgaagcgttagaagaattgttcgctaattccttaagcgattgcgtttcttatgagtccatcattcaaatcagcgcgaaagtccccactctagcccaaatcaaaaaaatcaaagaattgtgccaaaaataccaaaagaaattagtcagctcttcagaatacgctaaaaaactcaatgcgattgacaagattaaaaaaaccgaagaaaagcaaaaagttttagatgaagaattagaagatggctatgactttttgaaagaaaaggattttttagagtggagcagaagcgatagcccagtgcgcatgtatttgcgcgaaatgggggatataaaacttttaagcaaagatgaagagattgaattgagcaagcaaatccgcttgggtgaagacattattttagacgcgatctgctcggtgccgtatttgattgattttatctatgcgtataaagacgctttaatcaatcgtgaaagaagggttaaagagcttttcaggagctttgatgatgacgatgaaaatagcgtgagcgattctaaaaaagatgaagacaacgaagaagatgaagaaaacgaagaaaggaaaaaagtcgtttctgaaaaagacaagaagcgtgtagaaaaggttcaagaaagctttaaagccctagacaaggctaaaaaagaatggcttaaagcccttgaagcccccatagatgaaagagaagacgaattggtgcgttcattgaccctagcttacaaacgccaaacactcaaagacagactctatgatttagaacctaccagcaaactgattaatgaattagtcaaaacgatggaaaccactttaaaaagcggcgatgggtttgaaaaagagttgaaacgcttggaatacaaactgcccttattcaatgacactctcatcgcaaaccataaaaaaatccttgccaatatcactaacatgactaaagaagatattatcgctcaagtgccagaagcgactatggtgagcgtgtatatggatcttaaaaagctttttttgactaaagaagcgagcgaagaaggctttgatctagcccccaacaagctaaaagaaattttagagcaaatcaaaagagggaagttgatttccgatcgcgctaaaaacaaaatggctaaatccaatttaaggttggtggtgagcatcgctaaacgattcacgagcagaggcttaccattcttggatttgattcaagagggcaatattggcttgatgaaagcggtggataagtttgagcatgaaaagggcttcaagttttctacctatgcgacctggtggatcaaacaagctatcagcagagccatagccgatcaggcccgcactatccgcatccccattcacatgattgatacgattaatcgcatcaataaagtcatgcgcaaacacattcaagaaaacggcaaagagcctgatttagaagtggtggctgaagaagtggggctttcgttagataaagtgaagaatgtgattaaggtgactaaagagcctatcagtttggaaaccccagtcggcaatgatgatgatggcaagtttggggatttcgtggaagataagaatatcgtcagctccattgatcacatcatgcgagaagatttgaaagcacaaattgaaagcgttttggatcagttgaatgagcgagaaaaagcggtgatccgcatgcgttttgggcttttagacgatgaaagcgatcgaactttagaagaaattggcaaggaattgaatgttactagagaaagggtgcgccagattgaaagctctgcgattaaaaaattgagaagcccgcagtacgggcgcattttaagaaactatttgcgcatttgatgttaaggtttctctaaagcatgcgttattttcttgtagttttctt

SEQ ID NO: 456 - protein, 680 aa, Helicobacter pylori
MGSYFMECPMKKKANEEKAQKRAKTEAKAEATQENKTKENNKAKESKIKESKIKEAKAKEPIPVKKLSFNEALEELFANSLSDCVSYESIIQISAKVPTLAQIKKIKELCQKYQKKLVSSSEYAKKLNAIDKIKKTEEKQKVLDEELEDGYDFLKEKDFLEWSRSDSPVRMYLREMGDIKLLSKDEEIELSKQIRLGEDIILDAICSVPYLIDFIYAYKDALINRERRVKELFRSFDDDDENSVSDSKKDEDNEEDEENEERKKVVSEKDKKRVEKVQESFKALDKAKKEWLKALEAPIDEREDELVRSLTLAYKRQTLKDRLYDLEPTSKLINELVKTMETTLKSGDGFEKELKRLEYKLPLFNDTLIANHKKILANITNMTKEDIIAQVPEATMVSVYMDLKKLFLTKEASEEGFDLAPNKLKEILEQIKRGKLISDRAKNKMAKSNLRLVVSIAKRFTSRGLPFLDLIQEGNIGLMKAVDKFEHEKGFKFSTYATWWIKQAISRAIADQARTIRIPIHMIDTINRINKVMRKHIQENGKEPDLEVVAEEVGLSLDKVKNVIKVTKEPISLETPVGNDDDGKFGDFVEDKNIVSSIDHIMREDLKAQIESVLDQLNEREKAVIRMRFGLLDDESDRTLEEIGKELNVTRERVRQIESSAIKKLRSPQYGRILRNYLRI

SEQ ID NO: 457 - DNA, 745 bp, Helicobacter pylori
  CDS (25)...(717)
aagaatacgtgtgattgggagaaaatggtgcaaaaaattggcattttaggggcgatgagagaagaaataacccctatactagaattgtttggcgtggattttgaagagatccctttaggggggaatgtcttccataaaggcgtttatcacaacaaggaaatcattgtcgcttatagcaagattggcaaggtgcattccactttaaccacaacgagcatgattttagcgtttggcgttcaaaaggtgctttttagcggggtggctggaagcttagttaaagatttaaaaatcaatgatttactagtggctattcaattagtccagcatgatgtggatttgagcgcgtttgatcaccctttagggttcatcccagaaagcgcgatttttattgaaacgagcgaaagtttgaacgctttggctaaagaagtcgctaatgaacagcatatcgtgctcaaagaaggcgtcatcgcatcaggcgatcagtttgtgcatagcaaagaaaggaaagagtttttagttagcgagtttaaagcgagcgcggtggaaatggagggggcgagcgtggcgtttgtgtgccaaaaatttggcgtgccatgctgtgtgttaaggagcattagcgataacgctgatgaggaagctaacatgagctttgatgcgtttttagaaaaaagcgctcaaacttcagcgaaattcttaaaaagcatggtggatgagctttagggtttgtttttatagaggggtggaa

SEQ ID NO: 458 - protein, 231 aa, Helicobacter pylori
MVQKIGILGAMREEITPILELFGVDFEEIPLGGNVFHKGVYHNKEIIVAYSKIGKVHSTLTTTSMILAFGVQKVLFSGVAGSLVKDLKINDLLVAIQLVQHDVDLSAFDHPLGFIPESAIFIETSESLNALAKEVANEQHIVLKEGVIASGDQFVHSKERKEFLVSEFKASAVEMEGASVAFVCQKFGVPCCVLRSISDNADEEANMSFDAFLEKSAQTSAKFLKSMVDEL

SEQ ID NO: 459 - DNA, 1986 bp, Helicobacter pylori
  CDS (56)...(1945)
ggtgtccttaaacagcagggtgaaagagattttaaaagaaagcgctctgcattctatgcaagatagtttgcattttaaggttaatgaagtgcaaggggttttagaaaacacttatacgagcatgggcattgttaaagaaatgctccctaaagacaccaaaagagaaatcaaaatcggcttgttaaaaaacttcattttagccaattcgcatgtcgctggggtgagcatgttttttaaaggcagagaagatttaagattaacgcttttaagggataacaatacgattaagctagtggaaaatccgtcattagagaatagccctttagcgcaaaaagcgatgaaaaataaagaaatttctaaaagtttgggttattataggaaaatgcctaatggggcggaagtttatggggtggatattcttttacctttattgaatgagaacgctcaagaggttgtaggggctttgatgatttttatttccattgacagcttcagcaatgaaatcactaaaaacaggagcgatttatttttaattggcactaaaggtaaagtgcttttgagcgcgaataagagtttgcaagacaaacctatcgcagaaatttataagagcgtgcctaaagccaccaacgaagtgatggctattttagaaaacggctctaaagcgactttagaatacttagatccctttagccataaggaaaattttttagccgttgaaacctttaaaatgctaggcaaaacagaaagtaaagacaatcttaattggatgatcgctttaatcattgaaaaagacaaggtctatgagcaagtaggctcggtgcgttttgtggtgatcatagcgagcgcaatcatggtgttagccttgattatagcgatcactctcttaatgcgagcgatcgtgagcagtcgtttggaagccgtttctagcaccttgtctcatttctttaaattattgaacaatcaagccaattctagcggtattaaattgattgaagcgaaatccaatgacgagttaggccgcatgcaaacagcgatcaataaaaatatcttgcaaacccaaaaaatcatgcaagaagacaggcaagccgtccaagacaccattaaagtggtttcagatgtgaaagcagggaattttgcggtgcgcatcacggctgagcccgcaagccctgatttgaaagaattgagggacgcgctaaatgggatcatggattatttgcaagaaagcgtagggactcacatgccaagcattttcaaaatctttgaaagctattctggtttggattttagaggccggatccaaaacgcttcgggtagggtggaactggttactaacgctttagggcaagaaatccaaaaaatgctagaaacttcgtctaattttgccaaagatttagcgaacgatagcgcgaatttaaaagagtgcgtgcaaaatttagaaaaagcttcaaactcccaacacaaaagcttgatggaaacttccaaaacgatagaaaatatcaccacttccattcaaggcgtgagctctcaaagtgaagccatgattgaacaagggcaagacattaaaagcattgtagaaatcattagagatattgctgatcaaaccaatcttttagccttaaacgccgctattgaagccgcaagggccggcgagcatggcagaggctttgcggtggtggctgatgaggtaagaaagctcgctgaaaggacgcaaaaatcgctcagcgagattgaagccaatatcaatattttagtgcaaagcatttcagacacgagcgaaagcattaaaaaccaggttaaagaagtggaagaaatcaacgcttctattgaagccttaagatcggttactgagggcaatctaaaaatcgctagcgattctttagaaatcagtcaagaaattgacaaagtttctaacgatattttagaagatgtgaataaaaagcagttttaatgctcattcatatttgctgctcagtggataacctctat

SEQ ID NO: 460 - protein, 630 aa, Helicobacter pylori
MQDSLHFKVNEVQGVLENTYTSMGIVKEMLPKDTKREIKIGLLKNFILANSHVAGVSMFFKGREDLRLTLLRDNNTIKLVENPSLENSPLAQKAMKNKEISKSLGYYRKMPNGAEVYGVDILLPLLNENAQEVVGALMIFISIDSFSNEITKNRSDLFLIGTKGKVLLSANKSLQDKPIAEIYKSVPKATNEVMAILENGSKATLEYLDPFSHKENFLAVETFKMLGKTESKDNLNWMIALIIEKDKVYEQVGSVRFVVIIASAIMVLALIIAITLLMRAIVSSRLEAVSSTLSHFFKLLNNQANSSGIKLIEAKSNDELGRMQTAINKNILQTQKIMQEDRQAVQDTIKVVSDVKAGNFAVRITAEPASPDLKELRDALNGIMDYLQESVGTHMPSIFKIFESYSGLDFRGRIQNASGRVELVTNALGQEIQKMLETSSNFAKDLANDSANLKECVQNLEKASNSQHKSLMETSKTIENITTSIQGVSSQSEAMIEQGQDIKSIVEIIRDIADQTNLLALNAAIEAARAGEHGRGFAVVADEVRKLAERTQKSLSEIEANINILVQSISDTSESIKNQVKEVEEINASIEALRSVTEGNLKIASDSLEISQEIDKVSNDILEDVNKKQF

SEQ ID NO: 461 - DNA, 1758 bp, Helicobacter pylori
  CDS (8)...(1702)
  misc_feature 375: n = A,T,C or G
gagataaatgatgttttcttcaatgtttgcttcgttggggactcgtatcatgctggtcgtgttagccgctcttttaggtttaggggggctttttattggttttgtaaaggttatgcaaaaagatgtgttagcgcaactcatggagcatttagaaaccgggcaatacaaaaagcgtgaaaaaacgctcgcttacatgacaaaaattattgaacagggcattcatgagtattacaaaaattttgacaatgctactgcaagaaaaatggcgttagattatttcaaacgcatcaacgacgataagggcatgatttatatggtggtggtggataaaaacggggtggtattgtttgatccggtcaatcctaaaaccgtagnccaatcagggcttgacgctcagagcgttgatggggtgtattatgttagggggtatttggaggcggccaaaaaagggggaggctacacttattataaaatgcctaaatacgatggaggcgtaccggagaaaaaattcgcctactcgcattatgatgaagtttctcaaatggtgatcgcaacgacttcctattacactgacattaacacagaaaataaagcgatcaaagaaggcgtgaataaggtttttgatgaaaacaccacgaaattattcctttggatactgacagcgacgatagcgctagtggttttgacgctcatatacgctaaattaaggatcgtgaaacgcattgatgaactggtccttaaaatcaacgcttttagccgtggggataaggatttgagagccaaaattgatgtgggtgatcgcaacgatgaaatctcgcaagtgggccgtgggatcaatttgtttgtggaaaacgcccgcttgattatggaagagattaaagggatttccaccctcaataaaacttcaatggataaattagtccaaatcacgcaagaaacccaaaagagcatgaaagattcctcaaccaccctaaattccgtgaaaaataaagccactgatatagcgagcatgatgaatgcttccatagagcaatctcaagggttaaggaagcgtttgattgaaacgcaagggctggtcaaagagagcaaggatgcgatcggggatttattttctcaaatcacagagagcgcgcacactgaagaggaactctctagcaaagtggagcagctaagccgtaacgctgatgatgtcaaatccattctggatattatcaatgatattgccgatcaaacgaatttattagccctaaacgctgctattgaagccgcaagggctggcgagcatggcagaggctttgcggtggtggctgatgaagttaggaatttagccgggcgcactcaaaagtctttagccgaaatcaattccactatcatggtgattgtccaagaaatcaatgccgtgagttcgcaaatgaatctcaattcgcaaaaaatggagcgtttgagcgatatgagtaaaagcgtgcaagaaacttacgaaaaaatgagttctaatttaagctcagtcgtgtcagacagcaatcaaagcatggacgattacgccaaatccggacaccaaattgaagttatggtaagcgattttgcagaggtggaaaaagtggcttctaagactttagcggattcttcagatattttaaacatcgctacgcatgtgagtggaacgaccatgaatttagacaaacaagtgaatttgtttaaaacttaatcagggggagtttattaaaaaagggttggattgttaaaagtttctgtgatcac

SEQ ID NO: 462 - protein, 565 aa, Helicobacter pylori
  VARIANT 123: Xaa = Any Amino Acid
MMFSSMFASLGTRIMLVVLAALLGLGGLFIGFVKVMQKDVLAQLMEHLETGQYKKREKTLAYMTKIIEQGIHEYYKNFDNATARKMALDYFKRINDDKGMIYMVVVDKNGVVLFDPVNPKTVXQSGLDAQSVDGVYYVRGYLEAAKKGGGYTYYKMPKYDGGVPEKKFAYSHYDEVSQMVIATTSYYTDINTENKAIKEGVNKVFDENTTKLFLWILTATIALVVLTLIYAKLRIVKRIDELVLKINAFSRGDKDLRAKIDVGDRNDEISQVGRGINLFVENARLIMEEIKGISTLNKTSMDKLVQITQETQKSMKDSSTTLNSVKNKATDIASMMNASIEQSQGLRKRLIETQGLVKESKDAIGDLFSQITESAHTEEELSSKVEQLSRNADDVKSILDIINDIADQTNLLALNAAIEAARAGEHGRGFAVVADEVRNLAGRTQKSLAEINSTIMVIVQEINAVSSQMNLNSQKMERLSDMSKSVQETYEKMSSNLSSVVSDSNQSMDDYAKSGHQIEVMVSDFAEVEKVASKTLADSSDILNIATHVSGTTMNLDKQVNLFKT

SEQ ID NO: 463 - DNA, 525 bp, Helicobacter pylori
  CDS (16)...(474)
ccttgagattgctctatggaagcattcatcatgctcgctatatcagtggctttatttttcacggaatttagggtggttgaggaatctttcatgctcttttgggtttcttgcgtgatttggactaatttatccattgaagttttattgagggtggaaatccctttaatctcttccataatcaagcgggcgttttccacaaacaaattgatcccacggcccacttgcgagatttcatcgttgcgatcacccacatcaattttggctctcaaatccttatccccacggctaaaagcgttgattttaaggaccagttcatcaatgcgtttcacgatccttaatttagcgtatatgagcgtcaaaaccactagcgctatcgtcgctgtcagtatccaaaggaataatttcgtggtgttttcatcaaaaaccttattcacgccttctttgatcgctttattttctgtgttaatgtcagtgtaataggaagtcgttgcgatcaccatttgagaaacttcatcataatgcgag

SEQ ID NO: 464 - protein, 153 aa, Helicobacter pylori
MEAFIMLAISVALFFTEFRVVEESFMLFWVSCVIWTNLSIEVLLRVEIPLISSIIKRAFSTNKLIPRPTCEISSLRSPTSILALKSLSPRLKALILRTSSSMRFTILNLAYMSVKTTSAIVAVSIQRNNFVVFSSKTLFTPSLIALFSVLMSV

SEQ ID NO: 465 - DNA, 1209 bp, Helicobacter pylori
  CDS (25)...(1164)
aaattcaataaaaaaggaaaaaccatgcgcatgcaaaccaaattaatccatgggggcattagtgaggacgcaacaacgggggcggtgagcgtgcctatttatcaaacttccacctaccgccaagacgccataggccgccataagggctatgaatactctcgctcaggcaaccccacgcgctttgctttagaagaactcatcgctgatttagaagggggggttaaggggtttgcttttgcctctggattagctggaatccacgccgttttttccctcttgcaatcaggcgatcatgtgttattgggcgatgatgtttatggggggactttccgcttgtttaatcaagtgcttgtcaaaaacgggctttcttgcaccattatagacactagcgatatatcccaaattaaaaaggctatcaagcccaacaccaaagccctttatttagaaacccctagtaaccccttgcttaaaatcacggatttagcgcaatgcgctagtgtcgctaaagatcatggtttgctcactatcgtggataacacctttgccaccccctattatcaaaacccgcttcttttgggagcggacattgtggcacatagcggcaccaaatacttaggcgggcatagcgatgtggtcgccgggcttgtaaccactaataatgaagcgctagcccaagagatcgcttttttccaaaacgctatcggtggggttttaggccctcaagacagctggctgttgcaaagagggattaaaacgctgggattgcgcatggaagcccatcaaaaaaacgctctttgtgtggctgagtttttagaaaaacaccctaaagtggaaagggtttattacccgggccttcccactcaccctaattacgaactagctaaaaaacagatgcgtggctttagcgggatgctctctttcactctcaaaaatgatagcgaggcggttgcttttgtagaaagccttaaactattcattttaggcgagagtttgggcggggtggaaagtttggtggggattccggcatttatgacccatgcgtgcatccctaaaacgcaacgagaagctgctgggattagagatggcctggtgcgcttgtctgtagggattgagcatgaacaggatttgttagaagatttagagcaagcgttcgctaaaataggctaaagtttcattacaatttatgaataaaggagttaaaaacatgaa

SEQ ID NO: 466 - protein, 380 aa, Helicobacter pylori
MRMQTKLIHGGISEDATTGAVSVPIYQTSTYRQDAIGRHKGYEYSRSGNPTRFALEELIADLEGGVKGFAFASGLAGIHAVFSLLQSGDHVLLGDDVYGGTFRLFNQVLVKNGLSCTIIDTSDISQIKKAIKPNTKALYLETPSNPLLKITDLAQCASVAKDHGLLTIVDNTFATPYYQNPLLLGADIVAHSGTKYLGGHSDVVAGLVTTNNEALAQEIAFFQNAIGGVLGPQDSWLLQRGIKTLGLRMEAHQKNALCVAEFLEKHPKVERVYYPGLPTHPNYELAKKQMRGFSGMLSFTLKNDSEAVAFVESLKLFILGESLGGVESLVGIPAFMTHACIPKTQREAAGIRDGLVRLSVGIEHEQDLLEDLEQAFAKIG

SEQ ID NO: 467 - DNA, 912 bp, Helicobacter pylori
  CDS (46)...(873)
attattaactttttatgctataatgcgagggttctttcatcaagaatggtgattgacgagatttttcaaataatgatgttaagaagaattaaagtaggttctaatttgaataaaaaagagagtttgttagatgcgtttgttaaaacctatctgcagattttagaacccattagttctaaacgcttaaaagagttggcggacttgaaaatatcttgcgcgacgatcaggaattattttcaaatcctttctaaagagggcatgctttatcaagcccattctagtggcgctagattgcccacttttaaggcgtttgaaaactattggcaaaagtcgttgcgctttgaaactttaaaggtgaatgaaaaacgcctaaaaagcgcgagtgaaaattttgggcttttcacgctgttaaaaaaacccagtttggagcgtttagaaagagtcattgagtgcgaaaaacgctttttgattttggactttttggcgttttcttgcgcactgggttacagcgttaaaatggaaaagtttttattagagcttgtgggcagaagcgttaaagaagtgcgctcaatcgctgcttctttcaatgcgttgagtttggccaggcaattagagcgtttggagtattccaacacacaaatcacacgctttaatctgatggggttaaaaacgcttttaaacagccctttattttttgacattttagggggtaaggttttagagcgtttgagtaagggtttgcattttatagagcctgattgcatgctagtaacacgccctgtagaatttcaaaacaagcggatgcaactgctttgcgtggggaaactagaatgcgattatgaagggttttttcaaacgatttctgaggaggaataatgaaagatgaacacaaccaagaacacgatcatttaa

SEQ ID NO: 468 - protein, 276 aa, Helicobacter pylori
MVIDEIFQIMMLRRIKVGSNLNKKESLLDAFVKTYLQILEPISSKRLKELADLKISCATIRNYFQILSKEGMLYQAHSSGARLPTFKAFENYWQKSLRFETLKVNEKRLKSASENFGLFTLLKKPSLERLERVIECEKRFLILDFLAFSCALGYSVKMEKFLLELVGRSVKEVRSIAASFNALSLARQLERLEYSNTQITRFNLMGLKTLLNSPLFFDILGGKVLERLSKGLHFIEPDCMLVTRPVEFQNKRMQLLCVGKLECDYEGFFQTISEEE

SEQ ID NO: 469 - DNA, 720 bp, Helicobacter pylori
  CDS (50)...(685)
agctctttactattttattatctatcttttattaaaaaaacttgttatcatgataaacatgaacacacacacaagaggcattgacagcaatctgattcattcgctccaaagcatttcattatccatgtttagaaagggtttttttgggctttatcaaggctctatttcagcacgcattggcgcaaatcaatttgtgatcaacaaaagaaacgctgtttttgatcaattgaatgaaaacaccttactggttttgcatgacaaaatagattaccgctggaaagaagcgagcttggattcgcccattcatgcgagcgtgtatagggagtttttggacgctaaattcatcgcttacgcgcgccctccttatagtttggcgtattccttgcgccacaaccgattgctccctagagattatttagggtatcgttctttgggcgaagaaatttccatttttaaccccaaagactatgacagctggcaagaaagagcggatacagaaattttacgccaactgcaagagagcaaaaaatattttgttttcattaaggggtgtgggatttttgcctaccacagagagctttctaaactcatggaagtttttgatttgattgaaaactcatgcaaggttttacgattgggcgatttaatggattattgctataatgatgatccacgattgagcgtgtaaaaagctaaaaaggataaaacatgaccatcaac

SEQ ID NO: 470 - protein, 212 aa, Helicobacter pylori
MINMNTHTRGIDSNLIHSLQSISLSMFRKGFFGLYQGSISARIGANQFVINKRNAVFDQLNENTLLVLHDKIDYRWKEASLDSPIHASVYREFLDAKFIAYARPPYSLAYSLRHNRLLPRDYLGYRSLGEEISIFNPKDYDSWQERADTEILRQLQESKKYFVFIKGCGIFAYHRELSKLMEVFDLIENSCKVLRLGDLMDYCYNDDPRLSV

SEQ ID NO: 471 - DNA, 2498 bp, Helicobacter pylori
  CDS (91)...(2445)
gggagttttgtgcgatatatcaagtttttcaaagagttgaacaataaaaatgtgaatctggttgggggcaagaacgctagtattggtgaaatgtttcaagaattagtgcctattggtattaaagtgcctgatggctttgcgatcaccagcgaagcgtattggtatcttttagagcaaggaggggctaaacaaaaaatcatagagcttttagaaaatgttgatgccaccgaaattgatgtgttaaaaatccgctccaaacaaatcagagagcttatttttggcacgccttttcctagcgatttgagagatgagatttttcaagcttatgagattttaagccagcaataccacatgaaagaagccgatgtggctgtaaggagttccgctactgcagaagatttgccggacgcttcttttgccgggcagcaagacacttatttaaacattaagggtaaaaccgaattgatccactatatcaaatcctgtttagcgtcgctttttaccgatagagcgattagctatagggcgagtcgtgggtttgatcatttaaaagtcgcgctcagcgtgggggtgcaaaaaatggtgcgagcggataaaggcagcgcgggcgtgatgttttctattgacaccgaaaccggttttaaagacgcggtgtttatcacttcagcgtgggggttaggcgaaaatgtggtgggtggcacgataaaccctgatgaattttatgtgtttaagcccactttagagcaaaacaaacgccccattatcaaacgccaactcggcaataaaacgcaaaaaatggtctatgccccaaggggtagcgaacaccccaccagaaacattaaaaccaccaaaaaagaatggcaatccttttcattgagcgatgaagacgtgctgattttagccaaatacgccattgaaattgaaaaacactactctaaagaagccaaacaataccgccctatggatatagaatgggctaaagatggcgagagcggggaaatctttatcgttcaagcgcgcccagaaaccgttcaaagccaaaaaagtaaagaagaaagtcaagtctttgaaaaattcaaattcaaaaaccctaacgaaaagaaagagattatcttacaaggcagagcgattgggagtaaaattggctcaggaaaagtgcgcatcatcaatgatttggagcacatgaattcttttaaagagggcgaaattttagttacggataacaccgatccggactgggagccttgcatgaaaaaagcgagcgcggttatcactaatcgtggagggcgcacttgccatgccgctattgtggcgagagaaattggcgtgccagctatcgttggggtgagcggggcgactgatagcctttataccggcatggaaatcacggtttcttgcgctgagggcgaagagggctatgtgtatgcgggcatttatgagcatgaaattgaaagggtggagctttctaacatgcaagaaactcaaacaaaaatttacatcaatattggaaaccctgaaaaagcctttggcttttctcaactccctaatcacggcgtagggctagccaggatggaaatgattattttaaatcaaatcaaagcccaccctttagctttagtggatttgcaccacaaaaaaagcgtgaaagaaaaaaatgaaattgaaaacctcatggcaggctatgctaaccctaaagatttttttgtgaaaaaaatcgctgaaggcattggcatgatcagtgcagcgttttaccctaaacctgtcattgtgagaacgagcgatttcaaatccaatgaatacatgcgcatgcttggcggctctagctatgagcctaatgaagaaaaccccatgcttggctataggggggctagtcggtattattcagagagctataatgaagcgttttcgtgggagtgtgaagccttagcgttagtgagggaagaaatgggattaaccaacatgaaagtgatgatcccttttttgcgaaccattgaagagggtaaaaaagtcctagaaatcttaagaaaaaacaatttagaatccggtaaaaacgggcttgaaatttatatcatgtgcgaattgccggtgaatgtcattttggctgatgatttcttgagcttgtttgatggcttttctattggatcaaacgatttaacccagctcactttaggcgtggatagagacagcgaattggtcagccatgtctttgatgaaaggaatgaagcgatgctaaagatgtttaaaaaagcgattgaagcttgcaaaaggcacaacaaatattgcgggatttgcgggcaagccccaagcgattaccctgaagtaacagagtttttagtcaaagagggcatcacttccatttctttaaaccctgatagcgtgatccccacttggaacgctgtagccaagttagaaaaagaactaaaagaacatggcttaactgaacattgataataaataaatcaatctaacttgagtggatttttcgtattagtttccat

SEQ ID NO: 472 - protein, 785 aa, Helicobacter pylori
MFQELVPIGIKVPDGFAITSEAYWYLLEQGGAKQKIIELLENVDATEIDVLKIRSKQIRELIFGTPFPSDLRDEIFQAYEILSQQYHMKEADVAVRSSATAEDLPDASFAGQQDTYLNIKGKTELIHYIKSCLASLFTDRAISYRASRGFDHLKVALSVGVQKMVRADKGSAGVMFSIDTETGFKDAVFITSAWGLGENVVGGTINPDEFYVFKPTLEQNKRPIIKRQLGNKTQKMVYAPRGSEHPTRNIKTTKKEWQSFSLSDEDVLILAKYAIEIEKHYSKEAKQYRPMDIEWAKDGESGEIFIVQARPETVQSQKSKEESQVFEKFKFKNPNEKKEIILQGRAIGSKIGSGKVRIINDLEHMNSFKEGEILVTDNTDPDWEPCMKKASAVITNRGGRTCHAAIVAREIGVPAIVGVSGATDSLYTGMEITVSCAEGEEGYVYAGIYEHEIERVELSNMQETQTKIYINIGNPEKAFGFSQLPNHGVGLARMEMIILNQIKAHPLALVDLHHKKSVKEKNEIENLMAGYANPKDFFVKKIAEGIGMISAAFYPKPVIVRTSDFKSNEYMRMLGGSSYEPNEENPMLGYRGASRYYSESYNEAFSWECEALALVREEMGLTNMKVMIPFLRTIEEGKKVLEILRKNNLESGKNGLEIYIMCELPVNVILADDFLSLFDGFSIGSNDLTQLTLGVDRDSELVSHVFDERNEAMLKMFKKAIEACKRHNKYCGICGQAPSDYPEVTEFLVKEGITSISLNPDSVIPTWNAVAKLEKELKEHGLTEH

SEQ ID NO: 473 - DNA, 565 bp, Helicobacter pylori
  CDS (61)...(483)
gttatctttaatcaatcagatgatagaatttatcttttatttttgaattgggagcatttgatgaaaaaattagcggtttctttattatttacagggacttttttggggctttttttgaatgcgagcgattttaagagcatggatgacaagcaactattagagcaagcagggaaagttgctcctagcgaagtccctgagtttcgcgcggaagtcaataagcgattagcagtgatgaaagaagaagatcgtaaaaattataaagcggattttaagaaagcgatggataagaatttagcttctttaagccaagaagatcgcaacaagcgtaaaaaagaaattcttgaagcgattgctaacaaaaagaaaacaatgaccatgaaagaatatcgtgaagaagggttggatttgcatgattgcgcatgcgaaggcccttttcatgatcatgagagaaaaaaagggaaaaaaccaagccatcataagcattagcgcttagggtgtgctaactttttttgatttttgtgaaaccacgccgtaagtccctagcttttggctgtggggattaagg

SEQ ID NO: 474 - protein, 141 aa, Helicobacter pylori
MKKLAVSLLFTGTFLGLFLNASDFKSMDDKQLLEQAGKVAPSEVPEFRAEVNKRLAVMKEEDRKNYKADFKKAMDKNLASLSQEDRNKRKKEILEAIANKKKTMTMKEYREEGLDLHDCACEGPFHDHERKKGKKPSHHKH

SEQ ID NO: 475 - DNA, 558 bp, Helicobacter pylori
  CDS (51)...(506)
gggtgcatgggcctcaaaaagtcgctatcattctctactaaaggataagaatggaaaaattagaagtagggcaattagcccctgattttagattgaaaaacagcgatggcgtggaaatttctttaaaagatttgctccataaaaaagtggtgctgtatttctaccctaaagacaacacccccggatgcactctagaagccaaagactttagcgctctatttagtgaatttgaaaagaaaaacgctgttgtcgtaggcataagccctgataacgcgcaatcgcatcaaaaatttatcagccaatgctctttgaatgtgattttgctctgcgatgaagataaaaaagccgccaatctttacaaagcttatggcaaacgcatgctttatgggaaggagcatttggggattatccgctccaccttcattatcaacacgcaaggcgttttagaaaaatgtttctacaatgtcaaagcgaaaggccatgctcaaaaggttttagagagtttgtagtttaactttctaactttcgcccattttaatttgagattttttagccatt

SEQ ID NO: 476 - protein, 152 aa, Helicobacter pylori
MEKLEVGQLAPDFRLKNSDGVEISLKDLLHKKVVLYFYPKDNTPGCTLEAKDFSALFSEFEKKNAVVVGISPDNAQSHQKFISQCSLNVILLCDEDKKAANLYKAYGKRMLYGKEHLGIIRSTFIINTQGVLEKCFYNVKAKGHAQKVLESL

SEQ ID NO: 477 - DNA, 700 bp, Helicobacter pylori
  CDS (19)...(651)
acttagaaggggtgatttatgagtaaagagcttattttaaagcgcattaaagaagccagagccaagcatgccattcagggagcgaaccctatttataggaatatcattaaagtggagtttgaggacttggtggaagaatacaagcatttccaagtgttgaataaagctgaagtcattgaaagcgctaaagaaaatttagagcaagccattttaaaggctttagaaaattttaaaagcaaaaaaatcttacactccacagatttgaatttgaattttgaagcgtttaaggattttactttacagccttatgataaagaaattgaagcgatgcgtgaagagttgtttgagattgatacggctttattgcatggggtttgtgggatttcaagcttgggcatgattggggcggtctcttcgcatgcaagcccgcgattgctttcgctcatcacccttaattgcatcatcttattgaaaaaagaatccattgtgcgcaatttgagtgaaggcatgcaagctttaaaaaaccaaagccaaaacggtgcattacccacaaacatgctccttattggcgggcctagccggacagctgacattgaattaaaaaccgtttttggggtgcatgggcctcaaaaagtcgctatcattctctactaaaggataagaatggaaaaattagaagtagggcaattagcccctgatt

SEQ ID NO: 478 - protein, 211 aa, Helicobacter pylori
MSKELILKRIKEARAKHAIQGANPIYRNIIKVEFEDLVEEYKHFQVLNKAEVIESAKENLEQAILKALENFKSKKILHSTDLNLNFEAFKDFTLQPYDKEIEAMREELFEIDTALLHGVCGISSLGMIGAVSSHASPRLLSLITLNCIILLKKESIVRNLSEGMQALKNQSQNGALPTNMLLIGGPSRTADIELKTVFGVHGPQKVAIILY

SEQ ID NO: 479 - DNA, 571 bp, Helicobacter pylori
  CDS (52)...(531)
tattccaataacgactaccctattattttgcctagcggttcatgcacagggatgatgcggcatgattatttggaattgtttgaagggcatgcggaattcaacatggttaaagatttttgctctagggtgtatgaattgagcgaatttttggataaaaaattgcaagtcaaatatgaagataagggcgaaccccttaaaatcacatggcattctaattgccatgccttaagggtggctaaagtgattgactcggcgaaaaacctcatcagacagcttaaaaatgtggaactcattgaattggaaaaagaagaagaatgctgcgggtttggggggactttttcggttaaagagcctgaaatttcagcggttatggttaaagaaaagattaaaaacatagaaagccgtcaagtggatgtgattgtttcagcggatgctgggtgtttgatgaatatcagcaccgctatgcaaaaaatgggctctttgacaaaacccatgcatttttatgactttttagcctcaagacttgggctttaacattaaagaattattttaaggaatgatcatggaaaaa

SEQ ID NO: 480 - protein, 160 aa, Helicobacter pylori
MMRHDYLELFEGHAEFNMVKDFCSRVYELSEFLDKKLQVKYEDKGEPLKITWHSNCHALRVAKVIDSAKNLIRQLKNVELIELEKEEECCGFGGTFSVKEPEISAVMVKEKIKNIESRQVDVIVSADAGCLMNISTAMQKMGSLTKPMHFYDFLASRLGL

SEQ ID NO: 481 - DNA, 759 bp, Helicobacter pylori
  CDS (70)...(714)
aacctgcaaacccaccttaaaaggctcaaaagaagtgagtttgtgggccaaaaaaaggaattagagggcatggggaggttttctttaaaagaaattttaatgctcagccttaccttattggctttactgggttggatttttggcaaacctttaggcttgcatgcgagtgcgacggctttgattgtcatggttttaatggcgttttgtaagattgtaagctatgaagacatcattaaaaacaagagcgcgttcaatatttttttattgcttggatcgctgctcacgatggctggcgggcttaaaaatgtagggtttttaaattttatcggcaatgcggctcaaaattttttagagcatgctcacttggatccgttaatagcggtcttgtttattgtagccctcttttatctgtcgcattattttttcgcaagcatcaccgctcatgtgagcgcgttattcgcgctttttgtagggattggttcgcacattcaaggggtcaatttgcaagaattgagcttgtttttaatgttttctttagggattatggggattttaacgccctatggcacaggcccatccaccatttattacgggagcgggtatattcaaagcaaggatttttggaaatgggggtttatttttggctttttgtatttaatcgtgtttttaagcgtgtgcacaccttgggtcaaattcatcgcttataggtggttgtagctggaaactttacacaacgcccttttaaaatggtatgaagaa

SEQ ID NO: 482 - protein, 215 aa, Helicobacter pylori
MGRFSLKEILMLSLTLLALLGWIFGKPLGLHASATALIVMVLMAFCKIVSYEDIIKNKSAFNIFLLLGSLLTMAGGLKNVGFLNFIGNAAQNFLEHAHLDPLIAVLFIVALFYLSHYFFASITAHVSALFALFVGIGSHIQGVNLQELSLFLMFSLGIMGILTPYGTGPSTIYYGSGYIQSKDFWKWGFIFGFLYLIVFLSVCTPWVKFIAYRWL

SEQ ID NO: 483 - DNA, 357 bp, Helicobacter pylori
  CDS (37)...(309)
aaggggggatttatatcggtaaagagttgtttaagcatggctagtggcctttttgaaaacgatggaatcaaagacaacaaagcgcgagattttttctatagccatagctccctaattgtctttttccttttactgcttgggtttgggtattatttagggaagttgctttttgggggctcttctttagaagtttatttggatttaagagacaagcatgaacgattgcagcaagaaatcaccgaattgcaaagcaagaatgtgcgcttgcaaaagcgtttgtttgagttgaaggaattacggcctagagattagatttaaggaaaatggtagtgttaaaaaagatgataggtttggtgg

SEQ ID NO: 484 - protein, 91 aa, Helicobacter pylori
MASGLFENDGIKDNKARDFFYSHSSLIVFFLLLLGFGYYLGKLLFGGSSLEVYLDLRDKHERLQQEITELQSKNVRLQKRLFELKELRPRD

SEQ ID NO: 485 - DNA, 678 bp, Helicobacter pylori
  CDS (1)...(675)
atgatagaagttttaatgatagaagatgatatagaattagccgagtttttgagcgagtttttgctccaacatggcattcatgtaaccaattacgatgagccatataccggcattagtgcggctaacacacaaaattatgatttgttgttgttggatttgactttgcctaatttagacgggcttgaagtgtgtaggcgcatctccaaacaaaaacatatccctattattatttcttcagcgagaagtgatgtggaagataagattaaagcactagattatggggctgatgattacctccctaaaccctatgatcctaaagaattattagctcgcatccaatcgctactcaggcgttctcataaaaaagaagaagtgagtgagccaggcgatgcgaatatctttagggtggataaggatagccgagaagtgtatatgcatgaaaaaaagctggacttaactagggctgaatatgaaatcctttcgcttctcattagcaaaaaaggttatgtgtttagccgtgaaagcattgcgattgagagcgagagcatcaaccctgaaagctctaataaaagcattgatgtgatcattggccgtttgcgatctaagattgaaaaaaatcctaaacaaccgcaatacatcatctctgttagagggattggttataaattagaatactga

SEQ ID NO: 486 - protein, 225 aa, Helicobacter pylori
MIEVLMIEDDIELAEFLSEFLLQHGIHVTNYDEPYTGISAANTQNYDLLLLDLTLPNLDGLEVCRRISKQKHIPIIISSARSDVEDKIKALDYGADDYLPKPYDPKELLARIQSLLRRSHKKEEVSEPGDANIFRVDKDSREVYMHEKKLDLTRAEYEILSLLISKKGYVFSRESIAIESESINPESSNKSIDVIIGRLRSKIEKNPKQPQYIISVRGIGYKLEY

SEQ ID NO: 487 - DNA, 1134 bp, Helicobacter pylori
  CDS (72)...(1082)
aagtctatgccacgatcaatggtttccctttcaattcacagctcaaacttttagaagaacatattgataaaatggcagaattagagccggacgcttttattatcgctgcgcctggtgtggtgaaactcgctttaaaaatcgccccgcatatccctatccatttatccacgcaagcgaatgtcttaaatttgctagatgcacaagtgttttatgatttaggggttaaacgcatcgtgtgcgcgagggaattgagcctgaatgatgcgattgagattaaaaaagccttacctaatttagaattagaaatctttgtgcatgggagcatgtgctttgccttttcagggcgctgcttgatttcggccttacaaaaggggcgcgtgcctaatagagggagttgcgcgaatgattgccggtttgattatgaatattacgtgaaaaaccctgataatggcgtgatgatgagactggttgaagaagagggcgtaggcacgcatatttttaacgctaaggatttgaacctctctggccatatcgctgaaattttaagttccaacgccattagcgcgcttaagattgaagggcgcaccaagtccagttactacgccgcgcaaaccacgcgcatctatcgtttagcggttgatgatttttaccataacaccttaaagccgagtttttatgccagcgaattgaacacgcttaaaaacaggggttttacggacggctatttgatgcgaaggccttttgaaaggttggatactcaaaaccaccaaacagccattagcgaaggggattttcaagtcaatggcgaaataaccgaagacgggcgtttttttgcatgcaaattcaccactaccactaacaccgcttatgaaatcatcgctcccaaaaatgcggctatcacgcccatagtcaatgaaattggcaagatttacacctttgaaaaacgctcttatttagtgctgtataaaatccttttagaaaataacaccgagctagaaactatccatagcgggaacgtgaatttagtgcgactgcccgcacccttaccggcttttagttttttacgcacccaagtcagagtctaaaaatggcgtttagagattaggtattgaaaatgattaagagaaacgcatg

SEQ ID NO: 488 - protein, 337 aa, Helicobacter pylori
MAELEPDAFIIAAPGVVKLALKIAPHIPIHLSTQANVLNLLDAQVFYDLGVKRIVCARELSLNDAIEIKKALPNLELEIFVHGSMCFAFSGRCLISALQKGRVPNRGSCANDCRFDYEYYVKNPDNGVMMRLVEEEGVGTHIFNAKDLNLSGHIAEILSSNAISALKIEGRTKSSYYAAQTTRIYRLAVDDFYHNTLKPSFYASELNTLKNRGFTDGYLMRRPFERLDTQNHQTAISEGDFQVNGEITEDGRFFACKFTTTTNTAYEIIAPKNAAITPIVNEIGKIYTFEKRSYLVLYKILLENNTELETIHSGNVNLVRLPAPLPAFSFLRTQVRV

SEQ ID NO: 489 - DNA, 1123 bp, Helicobacter pylori
  CDS (19)...(1038)
attaaggagaaataagaaatgttacaaccccctaaaattgtcgctgaattgagcgctaatcataaccaggatttaaacctagccaaagaaagccttcatgccattaaggaaagcggtgcggattttgtcaagctccaaacctacacgccaagctgcatgactttaaactctaaagaagatcctttcatcattcaaggcactttatgggataaagaaaatttgtatgaattgtatcaaaaggcttctacccccctagaatggcatgctgaattgtttgagttggctagaaagcttgatttaggcatttttagctcgccttttagttcacaagctttagagcttttagagagcctaaattgccccatgtataaaatcgctagttttgaaatcgttgatttggacttgattgaaaaggccgctcgcacacaaaagcccattatcctttctagcggtatcgctacacacaccgaattgcaagacgctatctcattgtgcagaagagtgaataattttgacatcacccttttaaaatgcgtgagcgcttatcccagtaaaatagaagacgctaacttgttgagcatggttaaattaggcgaaatctttggcgttaaatttggcttgagcgatcacacgattggctctctttgccccattttagccaccactttaggagcgagcatgatagaaaagcatttcattttaaacaaatccttacaaaccccagacagcgcttttagcatggattttaacggatttaaaagcatggttgaagccatcaagcaaagcgttttagccttaggcgaagaagagccaagaatcaatccaaagactttagaaaagcgaagattttttgcacgctctttatttgttattaaggatattcaaaaaggcgaagcattgactgaaaacaatatcaaagccttacgccccaaccttggcttacaccctaaattttataaagaaattttaggccaaaaagcatcaaaattcttaaaagccaacacccccttaagcgctgatgatatagaacgctcattgtaggttcgttttgatcaaaaaatggggtttttaattttgttttatggttttagatttgattttaaactcattttctttattttaa

SEQ ID NO: 490 - protein, 340 aa, Helicobacter pylori
MLQPPKIVAELSANHNQDLNLAKESLHAIKESGADFVKLQTYTPSCMTLNSKEDPFIIQGTLWDKENLYELYQKASTPLEWHAELFELARKLDLGIFSSPFSSQALELLESLNCPMYKIASFEIVDLDLIEKAARTQKPIILSSGIATHTELQDAISLCRRVNNFDITLLKCVSAYPSKIEDANLLSMVKLGEIFGVKFGLSDHTIGSLCPILATTLGASMIEKHFILNKSLQTPDSAFSMDFNGFKSMVEAIKQSVLALGEEEPRINPKTLEKRRFFARSLFVIKDIQKGEALTENNIKALRPNLGLHPKFYKEILGQKASKFLKANTPLSADDIERSL

SEQ ID NO: 491 - DNA, 1234 bp, Helicobacter pylori
  CDS (31)...(1197)
gtgaatgagcgtttggaggtgctgttggaaatggttttgatgcggtttgaagagcccgatcctggaagagctatcagaacctttcagagcgtgaatgacagaggcgtgcctctcctcttgctagacaaactaaaatcccttctcatctattactccaacattttttgcgatgggaaaagggggctagaccaatttatcatcgatcattttggggagatctttaagatctttgccaagattaaaaagagcgaccacatctccagcgttggaggctttgatgaaggcgatatcttccgctaccacgcagggagccaaaaatttgatggaatcgagtttttagggcactacgaagcaagcacggacaaaacctacgagaaactcaaagatgaactaaaaaaaatcaaaaaaagcaaattgaaaagtttcatccaatcctatgtcagcgatttgaaaaatttctatcaggcttttcttgatctattgagcgagattgacaccaacccaaccacctttaaggtcatgctcatcaacaagatcgactcgtcttttttcaattcgctcatccgcctgaaaatcaacaacgaactagacgatgaaacgctgaaactctttgccaaaaccgatattgtgcttttcaaagctactagagataggccaggaacggacaacctgattaatgcgtatcttaaaaagggcaaagagggattgaagagcgagatgattgctcaatgcagaaatgatatagggctggctttttggcagtctgtaaacaacgcatccaactcatcatgcttccactatatcttctttgaaaagaactgccaggagatgggtcttgccgatctcaaaaaattgatccctaggaagcaattctcccaagaaaaagaacacatcatccccatcaatttattaaaacaggaatccaacaataagatcagagatcttggttttgaagacaaaaaagatcttgaagactacattgacacatacggcaacctcatctccctggaaaaatcgctcaatcgtaaggcaagcgataaggatctgtatggaaaagatgaaatctataaaagtagtgagatccctttcaacaggcgctttgatacaaaaaacttcaataagaaggcattggtaaaaagaaatgaagaaatgcgagaatggctgatcgacaccttttttaaggatttcgccgcccactaaagagagtgagattaaaagagagtgatcgcactca

SEQ ID NO: 492 - protein, 389 aa, Helicobacter pylori
MVLMRFEEPDPGRAIRTFQSVNDRGVPLLLLDKLKSLLIYYSNIFCDGKRGLDQFIIDHFGEIFKIFAKIKKSDHISSVGGFDEGDIFRYHAGSQKFDGIEFLGHYEASTDKTYEKLKDELKKIKKSKLKSFIQSYVSDLKNFYQAFLDLLSEIDTNPTTFKVMLINKIDSSFFNSLIRLKINNELDDETLKLFAKTDIVLFKATRDRPGTDNLINAYLKKGKEGLKSEMIAQCRNDIGLAFWQSVNNASNSSCFHYIFFEKNCQEMGLADLKKLIPRKQFSQEKEHIIPINLLKQESNNKIRDLGFEDKKDLEDYIDTYGNLISLEKSLNRKASDKDLYGKDEIYKSSEIPFNRRFDTKNFNKKALVKRNEEMREWLIDTFFKDFAAH

SEQ ID NO: 493 - DNA, 889 bp, Helicobacter pylori
  CDS (16)...(840)
ttataaaggaaaatcatgggatttttaaaaggtaaaaaagggcttattgtaggggtggcgaacaataaatccatcgcttatgggatcgctcaatcttgtttcaatcaaggggctactttggctttcacttatttgaatgagagtttagaaaagcgcgtaaggcctatcgcgcaggaattgaatagcccctatgtgtatgaattggatgtgagcaaagaagagcatttcaagtcgctatacaatagcgttaaaaaggatttaggctcattggattttattgttcatagcgtggcctttgcccctaaagaggctttagaggggagcttgttggaaacttctaaaagcgcgtttaacaccgctatggaaatttctgtttattctttaatagagctgacaaacaccctaaaacctttattgaataacggagcgtctgttttgactctaagctatttgggtagcaccaaatacatggcgcattacaatgtgatggggttggctaaagcggccctagagagtgcggtgcgttatttagcggtggatttaggcaaacaccatataagagtgaatgccctatcggccgggcctattaggacgctcgcttctagcgggatcgctgattttagaatgattttaaaatggaatgaaatcaacgcccctttaagaaaaaatgtgagtttagaagaagtgggcaatgccgggatgtatttgctctctagtttgtctagcggggtgagtggggaagtgcattttgtggatgctggctatcatgttatgggcatgggggctgtggaagaaaaagataataaagctacgctactgtgggatttgcataaagaacaataaggggtattgatgaaattaagcgaattgttaaacgcctattctattg

SEQ ID NO: 494 - protein, 275 aa, Helicobacter pylori
MGFLKGKKGLIVGVANNKSIAYGIAQSCFNQGATLAFTYLNESLEKRVRPIAQELNSPYVYELDVSKEEHFKSLYNSVKKDLGSLDFIVHSVAFAPKEALEGSLLETSKSAFNTAMEISVYSLIELTNTLKPLLNNGASVLTLSYLGSTKYMAHYNVMGLAKAALESAVRYLAVDLGKHHIRVNALSAGPIRTLASSGIADFRMILKWNEINAPLRKNVSLEEVGNAGMYLLSSLSSGVSGEVHFVDAGYHVMGMGAVEEKDNKATLLWDLHKEQ

SEQ ID NO: 495 - DNA, 1760 bp, Helicobacter pylori
  CDS (33)...(1688)
tggaggttagtaattttaaagggtaaaataaaatggaaaatcattcgcatgccaatacgcataccgatacgcgcaccgatgataaaagcactaagatcgtgcgcttgttggggttaatagggggagcgttaatcgcgcttgttatctactatgcgctcaattctcaaatgcctcatattgtagaagaaatccccaagctcagttctttgaattataaggcgatgcctgttgtggcaggggtggctgttttaatggggatatggtggatgactgaagccattgacttgcccgcaaccgcgcttttacctttggtgctttttagcgtctttagcgtggatcaattcgctagcgtcagctcttcttacgcatcgccgatcatctttctttttatgggagggtttattttagccctaagcatgcaaaaatggaatttgcacacgcgcatcgctttaagcattattttattagtaggcacaagccctaggaggttgattttaggtttcatgatggctacaggctttctgtctatgtgggtgagcaataccgcaacggcggtgatgatgctccctgttggcatgagcgttttgcaattagtcgctaaactggtgggcaaagaagacgcctctaattcatggcatcaaaaagaagaaatcaccaaagcgcatgggggtattatgagtaatatcgtgcataagggtaaagatattactcaagtcattcaagaaaagactactatctatcgcacgaatttcagtatttgcttgatgcttggcatcgcttatgcggcttctattggctctttaggcactttgattggcacgccgcctaacgctttattggccggctatatgaaaaccgctttcaatattgaaattgatttcgctcagtggatggtgtttgggacgccgttagcctttatcatgctcattttagcgtggctcttgctcacttatgtgattttccctttaaagattaaagaaatcccagggggtaaggaagtcattagggtagagttaaaaaaattaggccgtttgagtcaggcggaaatctctgtggggattatttttattttagcgtctttagggtggatttttttaggcgtaatgttaaaatcttggggcgttaagatagataaaattgattcagtgatcgctatgggggtttctgcgcttttattcattttgcccgctaaccatcagggcgataggctcattgattggggtgttgctaaaaaactcccttgggatgtgttgcttttatttggcggcgggttagccttgagcgcgcaattttctaaaaccgggttgagtttgtggatcgggcatttagtctctggcttttcgcatttaccgattttattcatcattgtcatggttactttaatggtcattttcttaaccgaaatcacttctaacaccgccaccgctgccgcatttttaccggtgattggaggggttgcgatgggcatgggttatgaaaaccatcagagcttgttattgaccattcctgtagccttgagtgcgacttgcgcgttcatgctccctgtggtcaccccaccgaatgcaatagcttatggctctgggtatgttaaaataacggacatgattaaagccggtttgtggcttaatctggtaggagttgttttgattagcacgtttagctattttttggtttcgttaatatttaattgattaaggaaaaaagtgaaagaagagttatttaaagaaaaatctcgttacattacagggtttgttttaatc

SEQ ID NO: 496 - protein, 552 aa, Helicobacter pylori
MENHSHANTHTDTRTDDKSTKIVRLLGLIGGALIALVIYYALNSQMPHIVEEIPKLSSLNYKAMPVVAGVAVLMGIWWMTEAIDLPATALLPLVLFSVFSVDQFASVSSSYASPIIFLFMGGFILALSMQKWNLHTRIALSIILLVGTSPRRLILGFMMATGFLSMWVSNTATAVMMLPVGMSVLQLVAKLVGKEDASNSWHQKEEITKAHGGIMSNIVHKGKDITQVIQEKTTIYRTNFSICLMLGIAYAASIGSLGTLIGTPPNALLAGYMKTAFNIEIDFAQWMVFGTPLAFIMLILAWLLLTYVIFPLKIKEIPGGKEVIRVELKKLGRLSQAEISVGIIFILASLGWIFLGVMLKSWGVKIDKIDSVIAMGVSALLFILPANHQGDRLIDWGVAKKLPWDVLLLFGGGLALSAQFSKTGLSLWIGHLVSGFSHLPILFIIVMVTLMVIFLTEITSNTATAAAFLPVIGGVAMGMGYENHQSLLLTIPVALSATCAFMLPVVTPPNAIAYGSGYVKITDMIKAGLWLNLVGVVLISTFSYFLVSLIFN

SEQ ID NO: 497 - DNA, 661 bp, Helicobacter pylori
  CDS (53)...(592)
ggtggcggcgtattttaacgggcgtcctatagaatgcgctcttattagcgccatggtcatggctagtgttatcgcttatcaaaaagcgcaccatagcgaagccattttaccctttttgtatccgggcgttgggttttttgcgctttttggggtttataaggattttggtgcagtagcgatcatttggcttttagtcgtggtggttgcaagcgatgtgggggcgttttttggaggcaagcttttaggcaaaacccctttcacgcccacttcgccgaataaaaccttagagggcgcgttgattggcgtggttttggcgagcgttttaggatcgtttgtgggcatggggaaattgagcggaggcttttttatggcgctcttttttagttttttaatcgctcttgtggcggtgtttggggatttgtatgaaagctatttgaaaagaaaggtcggtatcaaagatagcggtaagattttacccgggcatgggggcgttttagaccggttggattccatgctttttggggctttaggcttgcatgcgctgttgtattttttagaaatttggaaagaaacggcggtgtttttaggggattgaatggttgttttaggaagcaccggctctattgggaaaaacgccctaaaaatcgcaaaaaaatttggc

SEQ ID NO: 498 - protein, 180 aa, Helicobacter pylori
MVMASVIAYQKAHHSEAILPFLYPGVGFFALFGVYKDFGAVAIIWLLVVVVASDVGAFFGGKLLGKTPFTPTSPNKTLEGALIGVVLASVLGSFVGMGKLSGGFFMALFFSFLIALVAVFGDLYESYLKRKVGIKDSGKILPGHGGVLDRLDSMLFGALGLHALLYFLEIWKETAVFLGD

SEQ ID NO: 499 - DNA, 1157 bp, Helicobacter pylori
  CDS (12)...(1115)
taggggattgaatggttgttttaggaagcaccggctctattgggaaaaacgccctaaaaatcgcaaaaaaatttggcatagaaatagaggccttaagctgtgggaaaaatatcgctttaatcaatgaacaaatccaagttttcaaacccaagaaagtggcgattttagatcctagcgatttgaatgatttagagcctttgggtgcggaagtgtttgtggggttagagggcattgatgcgatgatagaagagtgcacctcaaatttagtccttaacgccattgtgggcgtggcaggattgaaagcgagctttaaaagcttacaaaggaataaaaaactggccctagcgaataaagaaagcttagtgagcgcggggcatttattagacatttcacaaatcacgcccattgatagcgagcattttggtttgtgggcgttgttgcaaaacaagactttaaagcctaaatccttaatcattagcgcgagtgggggggctttcagggacacgcctttagaatttattcctattcaaaacgcgcaaaatgcgctcaagcaccctaattggagcatgggatctaaaatcaccattgattcagcgagcatggtcaataagctttttgaaatcctagaaacttattggctttttggcgcgtctttaaagattgatgcgctgattgaaaggagttctatcgtgcatgctttggtggagtttgaagacaactctatcatcgcgcatttagcgagcgcagatatgcaattacccataagctatgcgatcgatccgaagttggcctctttgagcgcgtctatcaagcccttagatctatacgctttaagcgcgattaaatttgaacccattagcatggagcgctacactttgtggtgttataaagacttactgctagaaaaccctaagcttggcgtggtgctgaatgcgagcaatgaagtggcgatggagaagtttttaaacaaagagatcgcttttggtggccttatccaaaccatttctcaagccttagaatcatacgataaaatgcctttcaagctctctagtttagaagaagtgctggaattagacaaagaagttagggagcgttttaaaaatgtagcgggagtgtagtataataagattttgcttctaatagcgttttatttcaat

SEQ ID NO: 500 - protein, 368 aa, Helicobacter pylori
MVVLGSTGSIGKNALKIAKKFGIEIEALSCGKNIALINEQIQVFKPKKVAILDPSDLNDLEPLGAEVFVGLEGIDAMIEECTSNLVLNAIVGVAGLKASFKSLQRNKKLALANKESLVSAGHLLDISQITPIDSEHFGLWALLQNKTLKPKSLIISASGGAFRDTPLEFIPIQNAQNALKHPNWSMGSKITIDSASMVNKLFEILETYWLFGASLKIDALIERSSIVHALVEFEDNSIIAHLASADMQLPISYAIDPKLASLSASIKPLDLYALSAIKFEPISMERYTLWCYKDLLLENPKLGVVLNASNEVAMEKFLNKEIAFGGLIQTISQALESYDKMPFKLSSLEEVLELDKEVRERFKNVAGV

SEQ ID NO: 501 - DNA, 1025 bp, Helicobacter pylori
  CDS (22)...(999)
aaagaatataaaggaatcaaaatggcaaaacatgatttagtgggttcggttctctgggacgcatattctaaagaagttcaaaggcgcatggacaaccccacgcatttaggggtcatcaccgaagagcaggctaaagccaaaaacgctaagctcattgtggcggattatggcgcagaggcatgcggtgatgcggtgaggttgtattggcttgtagatgaaagcacggatagaattgttgacgcgaagtttaaaagctttggttgcggaacagcgatcgcaagctcagacatgatggtagagttgtgcttgaataaaagagtccaagatgcggtaaaaatcacgaatttagatgtggaaagaggcttgagagacgatccggacacgccggcggtgcctgggcaaaaaatgcactgctcggtgatggcgtatgatgtgatcaaaaaagctgccggcatgtatttggggaaaaacgctgaagattttgaagaagaaatcatcgtgtgcgagtgcgctagggtgagtttaggtacgattaaagaagtgattaagctcaatgatttaaaaagcgttgaagaaatcactaactacaccaaagccggtgctttttgtaaaagctgtgtgaggcctggagggcatgaaaaaagggattattacttggtggatattcttaaagaagtgcgcgaagaaatggaagctgaaaaacttaaagcgaccgctaataaatcccaaagcggagaattggctttcagggaaatgactatggttcaaaagattaaagcggtggataaagtcattgatgaaaatatccgcccgatgcttatgatggatggaggggatttagagattttagacattaaagaaagcgatgattacattgatgtgtatatccgctacatgggggcatgtgatgggtgcatgagcgcgactaccgggactttatttgccattgaaaacgctttgcaggaattattggatcgcagtatcagggtgttaccgatttgaactttttagggggtggaggcctt

SEQ ID NO: 502 - protein, 326 aa, Helicobacter pylori
MAKHDLVGSVLWDAYSKEVQRRMDNPTHLGVITEEQAKAKNAKLIVADYGAEACGDAVRLYWLVDESTDRIVDAKFKSFGCGTAIASSDMMVELCLNKRVQDAVKITNLDVERGLRDDPDTPAVPGQKMHCSVMAYDVIKKAAGMYLGKNAEDFEEEIIVCECARVSLGTIKEVIKLNDLKSVEEITNYTKAGAFCKSCVRPGGHEKRDYYLVDILKEVREEMEAEKLKATANKSQSGELAFREMTMVQKIKAVDKVIDENIRPMLMMDGGDLEILDIKESDDYIDVYIRYMGACDGCMSATTGTLFAIENALQELLDRSIRVLPI

SEQ ID NO: 503 - DNA, 414 bp, Helicobacter pylori
  CDS (19)...(375)
tagagcttgatttttttaatgttaataatggattggaaattaaaagtggtgaaagaaatcatcaccattaccgccacaaccgccacaatggggatcttaaccacatattcattaaacactaatatgagcaccattaaagaaaagccggcaaaaaaagtagaaagccttgttttagccccggattttgcgttaatgatagactgccccactaaagcgcaccctgtcattccccccaaaagccctgagatgatattccccaagccttgcgctttagtttctttatttttatcgctcacgccgtcttttaaaatcacatctaaagttttagccgtcaataagctttctatcgttcccactagtgctaaagaaagagcgtaaggcaacaactctatcattattttaaaatccaaattt

SEQ ID NO: 504 - protein, 119 aa, Helicobacter pylori
MLIMDWKLKVVKEIITITATTATMGILTTYSLNTNMSTIKEKPAKKVESLVLAPDFALMIDCPTKAHPVIPPKSPEMIFPKPCALVSLFLSLTPSFKITSKVLAVNKLSIVPTSAKERA

SEQ ID NO: 505 - DNA, 686 bp, Helicobacter pylori
  CDS (16)...(660)
tataaggttgctctcatgaaaaaaccctataggaagatttctgattatgcgatcgtgggtggtttgagcgcgttagtgatggtgagcattgtggggtgtaagagcaatgctgatgacaaaccaaaagagcaaagctctttaagtcaaagcgttcaaaaaggcgcgtttgtgattttagaagagcaaaaggataaatcttacaaggttgttgaagaataccccagctcaagaacccacattatagtgcgcgatttgcaaggcaatgaacgcgtgttaagcaatgaagagattcaaaagctcatcaaagaagaagaagctaaaattgataacggcacgagcaagcttgtccagcctaataatggagggagtaatgaaggctcaggctttggcttggggagcgcgattttagggagcgcggcgggggcgattttagggagttatattggtaataagcttttcaataaccctaattaccagcaaaacgcccaacggacctacaaatccccacaagcttaccaacgctctcaaaattccttttctaaaagtgcgcccagtgcttcaagcatgggcggagcgagtaagggacagagcgggttttttggctctagtaggcctactagttcaccggcggtaagctctgggacaaggggctttaactcataatttaattgattcaaggctaaaaa

SEQ ID NO: 506 - protein, 215 aa, Helicobacter pylori
MKKPYRKISDYAIVGGLSALVMVSIVGCKSNADDKPKEQSSLSQSVQKGAFVILEEQKDKSYKVVEEYPSSRTHIIVRDLQGNERVLSNEEIQKLIKEEEAKIDNGTSKLVQPNNGGSNEGSGFGLGSAILGSAAGAILGSYIGNKLFNNPNYQQNAQRTYKSPQAYQRSQNSFSKSAPSASSMGGASKGQSGFFGSSRPTSSPAVSSGTRGFNS

SEQ ID NO: 507 - DNA, 1407 bp, Helicobacter pylori
  CDS (16)...(1362)
ttataggactttttaatggagttagaaactcatttgtcaaaatatttcaccctagcctttacgcataaaagcatgagcttagaaatgcgagaaaaactcgctattaattcgaatgcaacgcttaaagaatttttacaaaccattaaaaaccattgccctaacatcaaagagtgcatggtgttatccacatgcaatcgctttgaaatctatgcgagcctaaaacacggcgctaatactaatgaacaaaaaaacgcactattaaagattttggctcaaaataaaaaaatgagcgtgtctgatttagaaaaatgcgttttaatgaacactgatgaaagcgcagtccatcatgtctttagcgtgtgcagcagtttggatagcttggtggttggggaaactcaaatcacagggcagatgaaaaacgcttataaattcgcttttgaagagaaattttgctctaaagatttaacccgattgctccattttgctttcaaatgcgccgctaaagtgcgcaatttaaccggcatttccaagcaaggggtttccatctcttcagtggcggtcaaagaagcgcttaatatttttgaaaaagaaaggattaaggataaaaaagcccttgtgatagggcttggcgagatggctcaattagtcatcaagcaccttttaaacaagcaatttgaagcgcttatcttagggcgtaatgcggctaaatttgaagatttcatcaaagaattagaagaacctaaaaaagtaagctttcaaaatatagaaaatttaaacgcttatatcaatgaatacgaactgcttttttgcgccacttcttcgccgcattttatcgtgcaaaatcgcatgttaaaagaaacgattttcaggcgtttttggtttgatttagccgtgccacggaatattgaaaagccggtattggataatattttcttatacagcgttgatgatttagagcctatggtgagagaaaatgtggaaaacaggcaagagagcagaatgagagcttatgagattgtagggcttgccacaatggagttttaccaatggattcaaagtttagaagtagagcctgtgattaaggatttaagggaattggctaggatttcagcccaaaaagaattgcaaaaagcgcttaaaaaacgctatgtgcctaaagaatacgaaaacaacattgaaaagatcttgcacaacgctttcaacacttttttgcataaccctaccatcgccttaaaaaagaacgctcaaaaagaagaatccgatgtgcttgtgggtgcgattaaaaacttgtttaatttagacaaatctaacgctaaccatgcccagaatttgaatctctataaatgcgaatattacgaggaataatgcatgctattttcaaaactctttgcccccactctcaaagaa

SEQ ID NO: 508 - protein, 449 aa, Helicobacter pylori
MELETHLSKYFTLAFTHKSMSLEMREKLAINSNATLKEFLQTIKNHCPNIKECMVLSTCNRFEIYASLKHGANTNEQKNALLKILAQNKKMSVSDLEKCVLMNTDESAVHHVFSVCSSLDSLVVGETQITGQMKNAYKFAFEEKFCSKDLTRLLHFAFKCAAKVRNLTGISKQGVSISSVAVKEALNIFEKERIKDKKALVIGLGEMAQLVIKHLLNKQFEALILGRNAAKFEDFIKELEEPKKVSFQNIENLNAYINEYELLFCATSSPHFIVQNRMLKETIFRRFWFDLAVPRNIEKPVLDNIFLYSVDDLEPMVRENVENRQESRMRAYEIVGLATMEFYQWIQSLEVEPVIKDLRELARISAQKELQKALKKRYVPKEYENNIEKILHNAFNTFLHNPTIALKKNAQKEESDVLVGAIKNLFNLDKSNANHAQNLNLYKCEYYEE

SEQ ID NO: 509 - DNA, 1202 bp, Helicobacter pylori
  CDS (40)...(1125)
aaaacccaaacgccgttaaaatatttaaaaaggaaattcatgcccattgatttgaacgaacatttaaaaaagaaaaattctcaaagagaaacccccacgcctaatacgcctaataatggggggcgtttcatcccgccgtctaattcttttaattctaaaaaactatcggttttaattgtcattgtccttttaggcgttatcgcttttttggccaagccttttgaagtgattagctcaggagaaattggcattaaaatcaccgccgggaaatacgaacccacccccttacagccagggatccacttctttgtgcctatcattcaagacattctcattgtggatacaaggattaggaatatcaatttttcacgcaccgaagacatgggcgtggcgggtaaaaaccaagggatttttagaaacgacgctattaatgtgatggatagtaggggtttgaccgtttctattgaactcaccgtgcaataccgcttaaacccccaaaccaccccccaaacgatcgctacttatggcttgtcttgggagcaaaaaatcatcaaccctgtggtgcgcgatgtggtgcgctctgtcgtggggcgctatccggctgaagatttacccattaagcgcaatgaaatcgccgctcttattaatagcggtatcaataaagaagtttctaagctccctaacacccctgtggaattaagctctatccaattgagagaaatcgtcttgcccgctaagattaaagagcaaatagaaaaagtccaaatcgcgcgccaagaatcagaaagggtgaaatacgaggtggagcgctccaagcaagaagctcaaaaacaagccgctctggctaaaggggaagcggacgctaacaggattaaggctcagggcgtggctgatgcgattgtgattgaggctaaggcaaaatctcaagctaatttaagcatttcgcaaagcttgagcgacaagcttttaagactgcgccaaattgaagttcaaggccagtttaatgaagcgttaaaaacgaacaataacgctcaaatcatgctcactccaggtggggctgtgcctaatatttggattgacactaaaagcaaggttaaatctagtattgccgagactaaagagccttaaaaacgcatggcatctcttgcctttatccaagcttttttggagtcttttaagggatttttaagtcaagcgactct

SEQ ID NO: 510 - protein, 362 aa, Helicobacter pylori
MPIDLNEHLKKKNSQRETPTPNTPNNGGRFIPPSNSFNSKKLSVLIVIVLLGVIAFLAKPFEVISSGEIGIKITAGKYEPTPLQPGIHFFVPIIQDILIVDTRIRNINFSRTEDMGVAGKNQGIFRNDAINVMDSRGLTVSIELTVQYRLNPQTTPQTIATYGLSWEQKIINPVVRDVVRSVVGRYPAEDLPIKRNEIAALINSGINKEVSKLPNTPVELSSIQLREIVLPAKIKEQIEKVQIARQESERVKYEVERSKQEAQKQAALAKGEADANRIKAQGVADAIVIEAKAKSQANLSISQSLSDKLLRLRQIEVQGQFNEALKTNNNAQIMLTPGGAVPNIWIDTKSKVKSSIAETKEP

SEQ ID NO: 511 - DNA, 630 bp, Helicobacter pylori
  CDS (23)...(559)
gactaaagagccttaaaaacgcatggcatctcttgcctttatccaagcttttttggagtcttttaagggatttttaagtcaagcgactctaatcagcgttttaatagcgagcgttttaatccttttttgcgcgattttgctccttttggctctgcttttgagaaaccgcttagctagctatatagcaacagcagcttttttgggtgcgtttttaagcatgccttttgttttgaacattttactcactcaagcgatttaccccatagaaacacgcatcttacacgctaaccctttaagttacagcaacgccttttctttgcaagtgggagtcaaaaaccattccaaatttactctaaacaaatgcgttttacgcctagaagtgcttaaaaaccctcacaattttgtagaagagcatgcttttaaatggtttgtcaaaaaaagctatgaaaaaatttttaaagaaaagattttgcccaaagaatctaaggtcttttcattctttattgacaactacccttattcaaaaacggccccttatcaagtttctttgttttgtttataaaaaactaaaagataacgcccaagataacattcattaaaaagcgattaaaaacgcttaaaggcatagat

SEQ ID NO: 512 - protein, 179 aa, Helicobacter pylori
MASLAFIQAFLESFKGFLSQATLISVLIASVLILFCAILLLLALLLRNRLASYIATAAFLGAFLSMPFVLNILLTQAIYPIETRILHANPLSYSNAFSLQVGVKNHSKFTLNKCVLRLEVLKNPHNFVEEHAFKWFVKKSYEKIFKEKILPKESKVFSFFIDNYPYSKTAPYQVSLFCL

SEQ ID NO: 513 - DNA, 1350 bp, Helicobacter pylori
  CDS (47)...(1273)
aaagaatgatcttaaaagggcaaaccacatttattaaggagaatgcatgcaagaaatcataggagcgtctttagtttttttgtgcaatgaaaagtgcgaagtgttagaagattatggcgtagtctttgatgaaaagattgttgaaataggcgattatcaaagtttaacgcttaaataccctcacttaaaggcgcagttttttgaaaattccgttctgttgcccgcttttatcaacgcgcacacccattttgaattttccaacaacaaggcgagttttgattacgggagtttttctggctggttagggagcgtgttaaacaatgggggggcgattttagaaaattgccaaggggctattcaaaacgctatcagcacgcaattaaaaagcggggtggggagcgtgggagcgatttctaaccacctgatagaagttaatttgttaaaagaaagccctttgaatgctgtcgtgtttttagagtttttagggagcagttattctttagaaaaattaaaagcgtttgaggccaaatttaaggaattaaaagatttagaagataaaaaacttaaagcggctctcgctgtgcatgccccttattcggtccaaaaagacatggctttgagcgtcatccaattagccaaagattcacaaagcctgctttctacgcattttttagaatcgcttgaagaattagaatgggtagaaaactctaaagggtggtttgaaaatttttaccagcattttttaaaggagtctcatttcaaatcgctctataagggcgcgaacgattacattgacatgtttaaagacacgcacactttattcgtgcataaccagttcgcttctttagaagcgttaaaaaggattaaatctcaagtcaaaaacgcttttttaatcacatgccccttttctaaccgcctattgagcgggcaagcgttggatttagaaagaactaaagaagccggtttgagcgtgagcgtggccactgatggcttgagttctaacatttcgctgagccttttagacgaattaagagcgtttttgctcacccataacatgccgttattagaattagctaaaatagcccttttaggggcgactaggcatggggctaaagctttagctttgaataatggcgagatagaagccaacaaaagggcggatttgagcgtgtttggttttaatgaaaaattcactaaagagcaagcgattttgcaatttttattgcatgctaaagaagtggagtgcttgtttttaggggggaaaagggtgatctaatttgttttaaagacagaatgcgttaaaatgagaaatctaaatcaattaaggaaagagtcaatgaaactagtttt

SEQ ID NO: 514 - protein, 409 aa, Helicobacter pylori
MQEIIGASLVFLCNEKCEVLEDYGVVFDEKIVEIGDYQSLTLKYPHLKAQFFENSVLLPAFINAHTHFEFSNNKASFDYGSFSGWLGSVLNNGGAILENCQGAIQNAISTQLKSGVGSVGAISNHLIEVNLLKESPLNAVVFLEFLGSSYSLEKLKAFEAKFKELKDLEDKKLKAALAVHAPYSVQKDMALSVIQLAKDSQSLLSTHFLESLEELEWVENSKGWFENFYQHFLKESHFKSLYKGANDYIDMFKDTHTLFVHNQFASLEALKRIKSQVKNAFLITCPFSNRLLSGQALDLERTKEAGLSVSVATDGLSSNISLSLLDELRAFLLTHNMPLLELAKIALLGATRHGAKALALNNGEIEANKRADLSVFGFNEKFTKEQAILQFLLHAKEVECLFLGGKRVI

SEQ ID NO: 515 - DNA, 1356 bp, Helicobacter pylori
  CDS (31)...(1320)
aggcttgtattgaaagtttatattgaaaccatgggttgtgccatgaattctagggatagtgagcatttattgagcgagctgtccaaactagactataaagagaccaatgaccctaaaacagcggatttgattttaatcaacacttgcagcgtgcgcgaaaagcctgaacgaaaattgttttcagaaatcggtcaattcgctaaaatcaaaaaacccaacgccaaaatcggggtttgcgggtgcactgcaagccacatgggagcggatattttgaaaaaagccccaagcgtgagctttgtgttaggggctaggaatgtgtctaaaatctctcaagtgatccataaagaaaaagcggttgaagtggcgattgattatgatgaaagcgcgtatgcgtttgaattttttgaaaaaaaggctcaaatccgatcgttgctaaatatctctatagggtgcgataagaaatgcgcttattgcatcgtcccgcacactagggggaaagaaatttctatccctatggatttgattttaaaagaagctgagaaattagcgaataacggcaccaaagagcttatgcttttagggcagaatgtgaataattacggcgcgcgtttcagcagcgagcatgcgaaagtggattttagcgatttgttggataaattgagcgaaatccaggggattgaaaggatacgattcacttcgcctcaccccttgcacatgaatgatggatttttagagcgttttgccaaaaaccctaaagtgtgcaagagtatccacatgcctttacagagcggatctagcgcggtgttaaagatgatgcgaaggggttatagtaaggagtggtttttaaatagggtggagaggttaaaagctttagtgcctgaagtgggcattagcacggatattatcgtaggcttccctaatgagagcgataaggattttgaagacacaatggaggtgctagaaaaagtgcgctttgacacgctctatagtttcatttattccccacgccctttcactgaagcgggagcttggaaggaaagagtgccgttagaagtttcatcttcaaggttggagaggttgcaaaacaggcacaaagaaattttagaagaaaaagccaagctagaagtgggcaaaacgcatgtggtgttggtggaaaacaggcgtgaaatggataatcaaatcgtgggttttgaagggcgtagcgatacggggaaattcattgaagtaacttgtaaggaaaaaagaaacccgggcgagcttgtaaaagtggagattatttctcattccaaagggcgcttgatggcggccactaaaggcaactaataaaaataaccaatgaaaaagcgggtttaaagg

SEQ ID NO: 516 - protein, 430 aa, Helicobacter pylori
MGCAMNSRDSEHLLSELSKLDYKETNDPKTADLILINTCSVREKPERKLFSEIGQFAKIKKPNAKIGVCGCTASHMGADILKKAPSVSFVLGARNVSKISQVIHKEKAVEVAIDYDESAYAFEFFEKKAQIRSLLNISIGCDKKCAYCIVPHTRGKEISIPMDLILKEAEKLANNGTKELMLLGQNVNNYGARFSSEHAKVDFSDLLDKLSEIQGIERIRFTSPHPLHMNDGFLERFAKNPKVCKSIHMPLQSGSSAVLKMMRRGYSKEWFLNRVERLKALVPEVGISTDIIVGFPNESDKDFEDTMEVLEKVRFDTLYSFIYSPRPFTEAGAWKERVPLEVSSSRLERLQNRHKEILEEKAKLEVGKTHVVLVENRREMDNQIVGFEGRSDTGKFIEVTCKEKRNPGELVKVEIISHSKGRLMAATKGN

SEQ ID NO: 517 - DNA, 1530 bp, Helicobacter pylori
  CDS (50)...(1501)
attgaaatacaaatacgaaagcttaaaagagcaagattaaaggctagcaatggctaaaatcacaaccgtgattgatataggctctaattcagtgcgtttggctgtctttaaaaagacgagccagtttgggttttacttgctttttgagactaagtctaaggttaggatttcagagggctgttatgcgtttaatggaatcttgcaagaaatccccatgcaacgagccgttaaagccttgagcgaatttaaagaaatcgctctcaaatacaaaagcaaaaaaatcctgtgcgtggcgacctcagcggtgcgcgatgcccctaatcggctggagtttgtagcgagggtgaaaaaggcttgcggtttgcaaatcaaaatcattgatgggcaaaaagaagcgctctatggcgggattgcgtgcgcgaatttgttgcataaaaattcagggatcacgatagatattggagggggtagcaccgagtgcgcgttgattgaaaaaggcaagattaaggacttaatctcgcttgatgttgggacgattcgcattaaagaaatgtttttagacaaagacttagaggtcaaattggctaaagcctttatccaaaaagaagtctctaaactgccctttaaacacaaaaacgcctttggggtgggggggacgatcagagcgttgagtaaggtattgatgaaacgcttttgttaccctattgattctttgcatggctatgaaatagatgcacataaaaatttagcgttcattgaaaaaatcgtcatgctcaaagaagatcaattacggcttttaggggtgaatgaagagcgtttggatagcatcaggagcggggcgttgattttatcagtcgttttggagcatttaaaaacttctttaatgatcactagtggggtgggggtgagagaaggcgtgtttttgagcgatttattgcgccatcattaccataaattcccccccaatatcaacccctctctcatctctttaaaagatcgctttttgccccatgaaaagcacagccaaaaggtcaaaaaagaatgcgtgaaattgtttgaagccttatcgcctttgcataaaatagatgaaaaataccttttccatttaaagattgcgggggaattagcgagcatgggtaagattttaagcgtctatttagcccacaagcacagcgcgtattttattttaaacgctttgagttatggctttagccaccaggatagagcgatcatttgcttattagcccaattcagccataaaaaaatccctaaagacaacgctatcgcccacatgagcgcgatgatgccaagccttttaaccttacaatggctgagttttatcctttctttagccgaaaatttgtgcctaacagacagccatcatttaaaatacacgctagaaaaaaacaagcttgtgatccattctaatgacacgctttacttggctaaagaaatgctccccaaactcgttaagcccattcctttgacgatagagtttgcttgaaaatagcgattgtcaggctttcagcg

SEQ ID NO: 518 - protein, 484 aa, Helicobacter pylori
MAKITTVIDIGSNSVRLAVFKKTSQFGFYLLFETKSKVRISEGCYAFNGILQEIPMQRAVKALSEFKEIALKYKSKKILCVATSAVRDAPNRLEFVARVKKACGLQIKIIDGQKEALYGGIACANLLHKNSGITIDIGGGSTECALIEKGKIKDLISLDVGTIRIKEMFLDKDLEVKLAKAFIQKEVSKLPFKHKNAFGVGGTIRALSKVLMKRFCYPIDSLHGYEIDAHKNLAFIEKIVMLKEDQLRLLGVNEERLDSIRSGALILSVVLEHLKTSLMITSGVGVREGVFLSDLLRHHYHKFPPNINPSLISLKDRFLPHEKHSQKVKKECVKLFEALSPLHKIDEKYLFHLKIAGELASMGKILSVYLAHKHSAYFILNALSYGFSHQDRAIICLLAQFSHKKIPKDNAIAHMSAMMPSLLTLQWLSFILSLAENLCLTDSHHLKYTLEKNKLVIHSNDTLYLAKEMLPKLVKPIPLTIEFA

SEQ ID NO: 519 - DNA, 1130 bp, Helicobacter pylori
  CDS (60)...(1073)
gccaactaccataaaaaggatttttctatccaaaatatagagcctaaaaaaattaaagaatgcgttttaaacatcttaaaggaaaaagaatgacttacaaagaacgactcatacacgaaaaaatattgaaacaagacgacaagggttttaaaacagaactgcgcattttgagtatttttatcgtggaatctttagtgaatattttggggtttattttagctaaaatgccccattcgtggtttttaaggtgcattaaagcggtggcgtggctcatgaaaacttttgataagtgccgttattttgacgctaaggccaatttggattttgtgtttggggattctaaaagcgaagaagagaaaaaaaggatcattaaaaagggttatgaaaattttgctttcattattttagaaactattagagtgatctttatccctaaagatgaatacgacgctcgtttcacgctcatcaatgaagaaaatgtgtggaaatctttaaacaaggaaggccaagcgatcactttatgcatgcattttggctattgggaagcggtaggcacgactttagcgcaatattatgaaaattatggtagggggtgtttggggcgtttgactaaatttgcccctatcaatcacatgattatgagtaggcgagaggcgtttggggtgcgttttgtcaataaaataggggcgatgaaagaactcattaaaatgtataatcaaggcaatggtctggtggggattttagtggatcaaaatgtcgtgcctaaagatggggtggtggtgaaattctttgatagagacgctacgcacaccacgatcgcttctattttgtcgcgccgttataatatagatattcagccggtattcattgattttaatgacgattattcgcattatacagcgacctattatccgagtatccgctctcaaatcaccgataacgcgcaaaacgatattttagaatgcacgcaagcccaagcgagtttgtgcgaagaggtgattagaaaccacccggaaagttatttttggttccataggcgttttaaaagcacccaccctgagatttatcaaagatagggttttgttttaatcaaaaattaaaaactaaagccttatttttaagaaaacttt

SEQ ID NO: 520 - protein, 338 aa, Helicobacter pylori
MRFKHLKGKRMTYKERLIHEKILKQDDKGFKTELRILSIFIVESLVNILGFILAKMPHSWFLRCIKAVAWLMKTFDKCRYFDAKANLDFVFGDSKSEEEKKRIIKKGYENFAFIILETIRVIFIPKDEYDARFTLINEENVWKSLNKEGQAITLCMHFGYWEAVGTTLAQYYENYGRGCLGRLTKFAPINHMIMSRREAFGVRFVNKIGAMKELIKMYNQGNGLVGILVDQNVVPKDGVVVKFFDRDATHTTIASILSRRYNIDIQPVFIDFNDDYSHYTATYYPSIRSQITDNAQNDILECTQAQASLCEEVIRNHPESYFWFHRRFKSTHPEIYQR

SEQ ID NO: 521 - DNA, 8748 bp, Helicobacter pylori
  CDS (16)...(8694)
agagggtagcatttaatgaaaaagtttaaaaagaaaccaaaaagtatcaaacgatcgcatcaaaatcaaaaaacaatcttaaagcgtcctttatggcttatgcctttactcatcagcgggtttgctagtggggtgtatgcgaataatctgtgggatttgttaaacccaaaagtggggggtgagtatgtgcattgggttaagggcagtcagtattgtgcatggtgggaatttgctgggtgtttaaagaatgtatggggggcaaatcataaaggctatgatgctggaaacgccgctaactatttgtcttctcaaaactatcaagctatttcggtgggtagtgggaatgaaacggggacttatagtttaagcggttttaccaattatgttgggggcaatctcacgatcaatctaggcaatagcgttgttttagatttaagcggttctaatagtttcacttcgtatcaaggttataatcaaggcaaagatgatgtaacatttacggttggcgcaatcaatttaaacggcactttagaagtgggtaatcgtgtgggatcgggagctggcacgcacaccggcacagccactttaaacttgaacgctaataaggtcaatatcaattccaatatcaacgcgtataaaacttcgcaagtgaatataggcaacgctaacagcgttattaccattggttcggtttctttgagtggggatgtttgcagttctttagctagcgttgggataggggctaattgctccacttctgggcctagctattcttttaaagggacgactaacgctactaacacggcgtttagtaatgcaagcggcagtttcacttttgaagagaacgccacttttagcggggcgaaatggaatggggggacttatacctttaataaagagtttagcgctaccaataacaccgcctttagtagcggtagttttaattttaaaggtgtaagctcttttaatggtacttcgtttagtaacgcttcttatacttttgacaatcaagccactttccaaaacagctcctttaatggggggacttttacttttaataaccaaactaatccaactaacaacgctcagcacccccaaattcaaaacagctcttttagtggtaacgctaccactcttaagggctttgtgaatttccagcaagcctttaacaattcaaaccaccaactaacgatccaaaacgcttcctttaataacgccacttttaacaataccggtaaaatcactatagaaaaagatgcgagttttaataacacgacattcaacacttctgttgatacaaacaacatgagtgttaccggtggcgttactttaagcggtaaaaatgacttgaaaaatggctcaacccttgattttgggagttctaaaatcactctcgctcaagggacgactttcaacctcacaagtttaggcagtgagaagagcgtaacgattttaaattctagcggtgggatcacttatagtaaccttttaaaccatgcaatcaacggcttgacaagtgccttaaaaacgaacgaaagcctttcaaatccgcaaagtttcgctcaaggtttgtgggatataatcacttacaatggggttaccgggcagcttttgaatgaaaacgctgcaacatctaaacccactgactcttcgccctctaaatcctctacaaactctacgcaagtctatcaagtgggttacaaaataggggatactatctacaaactgcaagaaactttcagccacaattccattattattcaggctttagagagcgggacttacacgccaccccctgtcattaacggctccaaatttgacttatccgcttcaaattatatcaatgctgacatgccttggtatgaccataaatattacatccctaaatcccaaaattttacagagagcgggacttattacttgccgagcgtccaaatatgggggagctacactaactcgtttaaacaaacttttagcgcaaatggtagtaatctggtgattgggtataactcaacatggactgatcataatgtctcttctagcggcacggtgtcttttggggacacttcagggagcgctcttaatgggcattgcggaccttggccgtattaccaatgcacaggcacgactaacggcacttatagcgcctatcatgtgtatatcacagcgaatctgcgttctggcaatcgtataggcaccggtggggcagctaatctaatctttaatggggtagatagtatcaatatcgctaacgctaccatcacgcaacataacgccggaatctattcaagctctatgactttttccacgcaaagcatggataattcgcagaatttgaatggtctaaattctaacggcaaactttcggtgtatggcaccactttcactaacgaagctaaagatgggaaattcattttcaatgcagggcaagcggtttttgaaaacaccaactttaatggagggagttaccaattcagcggcgatagcttgaatttttcaaacaacaaccagttcaatagcggttcgtttgaaattagcgcaaaaaacgcttcgttcaataacgctaactttaacaacagcgcttcttttaatttcaataattctaacgcgaccacttcgtttgtgggggatttcactaacgctaattcaaatttgcaaatcgccgggaacgctgtttttgggaactctactaatggctctcaaaataccgctaattttaataataccggctctgttaatatttcagggaatgcaacctttgataatgtggtgtttaatggccctacgaacacgagcgtgaaagggcaggttactttaaataacatcactttaaaaaacctgaacgcccctttgtcttttggcgatgggacgattacttttaacgctcattcggtgattaatattgctgaatctatcactaatggcaaccctatcactcttgtaagctcttctaaagaaattgaatacaacaacgctttcagtaaaaatctatggcagctcatcaactaccaagggcatggggcaagcagtgaaaagctcgtctctagcgcgggtaatggcgtttatgatgtggtgtattctttcaataaccaaacctacaatttccaagaggttttttcacaaaacagcatttctatccggcgtttgggcgttaacatggtgtttgattatgtggatatggaaaaatcggatcatttatattatcaaaacgctctcggttttatgacctacatgcctaatagctataacaataatttagggaatgcaaacaacaccatttactattacgacaagagcattgatttttatgcgagcgggaaaactctattcactaaagcggaattttctcaaacattcaccgggcaaaacagcgcgatcgtttttggggctaaaagcatatggacgagcttaagcgatgcaccgcagtctaacaccatcattcgctttggggacaataagggagcagggagtaatgatgcgagcgggcattgctggaatttgcaatgcataggctttattacagggcattatgaagcgcaaaagatttacatcaccggtagcattgaaagcgggaatcgcatttctagcggtgggggcgcgagccttaattttaacgggcttcaaggcattcttttaacgaacgcgactttgtataaccgcgccgctggcacgcaaagctcgtctatgaattttatctctaacagcgcgaacattcaggctcaaaactcctattttatagacgataccgcacaaaatggcggtaaccctaatttcagtttcaacgctttgaatctggatttttctaacagctcttttagaggctatgtggggaaaacgcaatctgtttttaaattcaatgccaagaatgcgatcagtttcaccaacagcacgaatttaagctctggtttgtatcaaatgcaagctaaaagcgtgttgtttgacaattccaatttaagcgtttcagtggggacaagcagtattaaagccaatgcgatcaatctttctcaaaatgcctctattaatgcgagcaaccattcaaccttagaacttcaaggcgatttgaatgtgaacgacaccagctcgctcaacctcaaccaaagcacgattaatgtttccaataacgccacgatcaacgattatgcgagcttgattgcgagtaatggctctcaccttaattttaacggggcggttaatttcaattcagcgaatattactacgagtttgaataattcctctatcgtgtttaagggggcggtctctttaggagggcagtttaatttaagcaataactcttctttagatttccaaggctctagcgctatcacctctaacacggcgtttaatttctatgataacgctttttctcaaagccccatcactttccatcaagcccttgacattaaagcgcccttaagtttgggaggcaaccttttaaaccctaacaacagcagcgtgctggatttaaaaaacagccagcttgtttttggcgatcaagggagtttgaatatcgctaacattgatttactaagcgatctaaatgataataaaaatcgtgtgtataacatcattcaagcggacatgaatagtaattggtatgagcgtatcagcttctttggcatgcacatcaatgacgggatttatgatgctaaaaaccaaacttatagtttcactaacccccttaataacgccctaaaaatcaccgagagctttaaagacaaccaactaagcgttacgctctctcaaatcccgggtattaaaaacacgctctataacattggctctgaaatttttaactaccaaaaagtttataacaacgctaatggcgtgtattcttatagcgatgatgcacaaggcgtgttttatctcacaagcaacgtgaaaggctattacaaccctaaccaatcctatcaagccagcggcagtaacaacaccacgaaaaataataatctaacctctgaatcttctatcatctcgcaaacctataacgcgcaaggcaaccctattagcgcgttgcacatctataacaagggctataatttcaacaatatcaaagcgttagggcaaatggctctcaaactctaccctgaaatcaaaaaggtattagggaatgatttttcgccctcaagtttgaacgctttaaactctaatgcgctaaaccaacttaccaaactcatcacgcctaacgactggaaaaacattaacgagttgattgataacgcaaacaattcggtggtgcaaaatttcaataacggcactttgattgtgggagcgactcaaatagggcaaacagacaccaatagcgcggttgtttttgggggcttgggctatcaaacaccttgtgattatactgatattgtgtgccaaaaatttagaggcacttatttaggacagcttttagagtccagctcggctgatttgggctatattgacacgacttttaacgctaaagaaatttatcttaccggcactttagggagcgggaacgcatgggggactggggggagcgcgagcgtaacttttaacagccaaacttcgctcattctcaatcaggctaatatcgtaagctcgcaaaccgatgggatctttagcatgctgggtcaagagggtattaataaggttttcaatcaagccgggctcgctaatattttgggcgaagtggcggtgcaatccatcaacaaagccgggggattagggaatttgatagtaaatacgctagggagtaatagcgtgattggggggtatttaacgcctgaacaaaaaaatcaaaccctaagccagcttttagggcagaataactttgataatctcatgaacgatagcggtttgaatacggcgattaaggatttgatcagacaaaaattaggcttttggaccgggctagtggggggattagccggactagggggcattgatttgcaaaaccctgaaaagcttataggcagcatgtcaatcaatgatttattgagtaaaaaagggttgttcaatcagatcaccggctttatttccgctaacgatatagggcaagtcataagcgtaatgttgcaagatattgtcaaaccgagcaacgctttaaaaaacgatgtagcggctttaggcaagcaaatgattggcgaatttttaggccaagacacgctcaattctttagaaagcttgttgcaaaaccagcagattaaaagcgttttagacaaagtcctagcggctaaaggtttagggcctatttatgaacaaggcttgggggatttgatacctaatcttggtaaaaaagggcttttcgctccttatggcttgagtcaagtgtggcaaaaaggggattttagtttcaacgcacaaggcaatgtttttgtgcaaaattccactttctctaacgccaatggaggcacgctctcttttaacgcaggaaattcgctcatttttgccggaaacaatcatattgcattcactaaccacgctggaactcttcaattattgtccgatcaagtttctaacattaacatcaccacgcttaacgctagcaacggccttaagattaacgccgctaataacaatgtttctgtgtctcaaggcaatctgtttgtcagcgctagctgcgcgcaacaaagcgatccaactacagctaatattgcaaacccttgcgcgcttagcgcccaaagcacgaatggcgcttcttctaataatgcgtcaaataacgcgccaatcgccttgagtaataacgatgaaagcttgatggttgcggcgaatgatttcaatttttcaggcaatatttacgctaatggggtggttgatttttcaaagattaaaggctctgcaaacattaaaaacctgtatctttacaataacgctcaattccaagccaacaatctcactatttccaatcaagcggtgttagaaaaaaacgccagctttgtaacgaataatttaaacattcaaggagcgtttaacaacaacgccacgcaaaaaatagaggtgcttcaaaatttagtgatcgcttcaaacgcttctttaagcaccgggatttatgggttagaagtagggggggctttgaataattctggagcgatccattttaatttagaaaatacccaaacgccaacgccgctcattcaagcagaggggatcattaacctcaacaccacccaaacgccttttatgaatgtcaataacagcatggccaataatacgacttacactttattaaaaagcagccgttacattgattacaatatcaaccccaacagcttgcaatcgtatttgaatctctacactttaatcaatatcaacgggaaccacatagaggaaaaaaacggcgcattgacttatttgggccaacgggttttgttgcaagataaggggttattgttaagcgtagcgctgcccaactcaaacaacgcttctcaaaacaacattttaagcctttctgtcctttataaccaagttaaaatgtcttgcggcgataaagcgatggattttaccccccctaccttacaagattacattgtgggcattcaagggcaaagcgcgctcaatcaaattgaagctgttggggggaacgctatcaagtggctttcaacattgatgatggagactaaagaaaacccgttttttgcgccgatttatttaaaaaaccactctttgaatgaaatcttaggcgtaacaaaagatcttcaaaacaccgcaagcttgatttctaaccctaattttagagataacgctaccaatcttttagaattggcgagttacacccaacaaaccagccgtttaacaaaactctctgattttagatctagagagggagagtctgatttttctttgttagagcttaaaaacaagcgttttagcgatcctaatccagaggtttttgtcaaatactctcaacttagcaaacacccaaataacctttgggttcaaggggtgggaggagcgagctttatttctgggggcaatggcacgctttatggcttgaatgcgggctatgacaggttggttaaaaatgtgatccttgggggttatgtggcttatggctatagcgactttaatgggaacatcatgcattctttgggtaataatgtggatgtggggatgtatgcgagggcttttttaaaaaggaacgaattcactttgagcgcgaatgaaacttatggaggcaatgcaactagtatcaattcttctaattctttgctctctgtgttgaaccaacgctacaactacaacacctggacaacgagcgtgaacgggaattacggctatgatttcatgttcaaacaaaaaagcgtggtgctaaaacctcaagtgggtttgagctatcatttcataggtctaagtgggatgaaaggcaatgatgccgcttacaaacaattcctcatgcattcaaacccctctaacgaatcggttttaacgctcaacatggggttggagagccgtaaatattttggtaaaaattcctattattttgtaacggcgagactaggtagggatcttttgatcaaatctaaaggcagcaatacggtgcgttttgtgggcgaaaacactttattgtatcgcaagggggaagtttttaacacttttgcgagcgtgattacagggggcgaaatgcatttgtggcgtttggtgtatgtgaatgcgggggtggggcttaagatgggcttgcaataccaagatattaatataaccgggaatgtgggcatgcgagtggcgttttagcttttttgctataatgcttcgttcaaattttatggttaggtttttctatgt

SEQ ID NO: 522 - protein, 2893 aa, Helicobacter pylori
MKKFKKKPKSIKRSHQNQKTILKRPLWLMPLLISGFASGVYANNLWDLLNPKVGGEYVHWVKGSQYCAWWEFAGCLKNVWGANHKGYDAGNAANYLSSQNYQAISVGSGNETGTYSLSGFTNYVGGNLTINLGNSVVLDLSGSNSFTSYQGYNQGKDDVTFTVGAINLNGTLEVGNRVGSGAGTHTGTATLNLNANKVNINSNINAYKTSQVNIGNANSVITIGSVSLSGDVCSSLASVGIGANCSTSGPSYSFKGTTNATNTAFSNASGSFTFEENATFSGAKWNGGTYTFNKEFSATNNTAFSSGSFNFKGVSSFNGTSFSNASYTFDNQATFQNSSFNGGTFTFNNQTNPTNNAQHPQIQNSSFSGNATTLKGFVNFQQAFNNSNHQLTIQNASFNNATFNNTGKITIEKDASFNNTTFNTSVDTNNMSVTGGVTLSGKNDLKNGSTLDFGSSKITLAQGTTFNLTSLGSEKSVTILNSSGGITYSNLLNHAINGLTSALKTNESLSNPQSFAQGLWDIITYNGVTGQLLNENAATSKPTDSSPSKSSTNSTQVYQVGYKIGDTIYKLQETFSHNSIIIQALESGTYTPPPVINGSKFDLSASNYINADMPWYDHKYYIPKSQNFTESGTYYLPSVQIWGSYTNSFKQTFSANGSNLVIGYNSTWTDHNVSSSGTVSFGDTSGSALNGHCGPWPYYQCTGTTNGTYSAYHVYITANLRSGNRIGTGGAANLIFNGVDSINIANATITQHNAGIYSSSMTFSTQSMDNSQNLNGLNSNGKLSVYGTTFTNEAKDGKFIFNAGQAVFENTNFNGGSYQFSGDSLNFSNNNQFNSGSFEISAKNASFNNANFNNSASFNFNNSNATTSFVGDFTNANSNLQIAGNAVFGNSTNGSQNTANFNNTGSVNISGNATFDNVVFNGPTNTSVKGQVTLNNITLKNLNAPLSFGDGTITFNAHSVINIAESITNGNPITLVSSSKEIEYNNAFSKNLWQLINYQGHGASSEKLVSSAGNGVYDVVYSFNNQTYNFQEVFSQNSISIRRLGVNMVFDYVDMEKSDHLYYQNALGFMTYMPNSYNNNLGNANNTIYYYDKSIDFYASGKTLFTKAEFSQTFTGQNSAIVFGAKSIWTSLSDAPQSNTIIRFGDNKGAGSNDASGHCWNLQCIGFITGHYEAQKIYITGSIESGNRISSGGGASLNFNGLQGILLTNATLYNRAAGTQSSSMNFISNSANIQAQNSYFIDDTAQNGGNPNFSFNALNLDFSNSSFRGYVGKTQSVFKFNAKNAISFTNSTNLSSGLYQMQAKSVLFDNSNLSVSVGTSSIKANAINLSQNASINASNHSTLELQGDLNVNDTSSLNLNQSTINVSNNATINDYASLIASNGSHLNFNGAVNFNSANITTSLNNSSIVFKGAVSLGGQFNLSNNSSLDFQGSSAITSNTAFNFYDNAFSQSPITFHQALDIKAPLSLGGNLLNPNNSSVLDLKNSQLVFGDQGSLNIANIDLLSDLNDNKNRVYNIIQADMNSNWYERISFFGMHINDGIYDAKNQTYSFTNPLNNALKITESFKDNQLSVTLSQIPGIKNTLYNIGSEIFNYQKVYNNANGVYSYSDDAQGVFYLTSNVKGYYNPNQSYQASGSNNTTKNNNLTSESSIISQTYNAQGNPISALHIYNKGYNFNNIKALGQMALKLYPEIKKVLGNDFSPSSLNALNSNALNQLTKLITPNDWKNINELIDNANNSVVQNFNNGTLIVGATQIGQTDTNSAVVFGGLGYQTPCDYTDIVCQKFRGTYLGQLLESSSADLGYIDTTFNAKEIYLTGTLGSGNAWGTGGSASVTFNSQTSLILNQANIVSSQTDGIFSMLGQEGINKVFNQAGLANILGEVAVQSINKAGGLGNLIVNTLGSNSVIGGYLTPEQKNQTLSQLLGQNNFDNLMNDSGLNTAIKDLIRQKLGFWTGLVGGLAGLGGIDLQNPEKLIGSMSINDLLSKKGLFNQITGFISANDIGQVISVMLQDIVKPSNALKNDVAALGKQMIGEFLGQDTLNSLESLLQNQQIKSVLDKVLAAKGLGPIYEQGLGDLIPNLGKKGLFAPYGLSQVWQKGDFSFNAQGNVFVQNSTFSNANGGTLSFNAGNSLIFAGNNHIAFTNHAGTLQLLSDQVSNINITTLNASNGLKINAANNNVSVSQGNLFVSASCAQQSDPTTANIANPCALSAQSTNGASSNNASNNAPIALSNNDESLMVAANDFNFSGNIYANGVVDFSKIKGSANIKNLYLYNNAQFQANNLTISNQAVLEKNASFVTNNLNIQGAFNNNATQKIEVLQNLVIASNASLSTGIYGLEVGGALNNSGAIHFNLENTQTPTPLIQAEGIINLNTTQTPFMNVNNSMANNTTYTLLKSSRYIDYNINPNSLQSYLNLYTLININGNHIEEKNGALTYLGQRVLLQDKGLLLSVALPNSNNASQNNILSLSVLYNQVKMSCGDKAMDFTPPTLQDYIVGIQGQSALNQIEAVGGNAIKWLSTLMMETKENPFFAPIYLKNHSLNEILGVTKDLQNTASLISNPNFRDNATNLLELASYTQQTSRLTKLSDFRSREGESDFSLLELKNKRFSDPNPEVFVKYSQLSKHPNNLWVQGVGGASFISGGNGTLYGLNAGYDRLVKNVILGGYVAYGYSDFNGNIMHSLGNNVDVGMYARAFLKRNEFTLSANETYGGNATSINSSNSLLSVLNQRYNYNTWTTSVNGNYGYDFMFKQKSVVLKPQVGLSYHFIGLSGMKGNDAAYKQFLMHSNPSNESVLTLNMGLESRKYFGKNSYYFVTARLGRDLLIKSKGSNTVRFVGENTLLYRKGEVFNTFASVITGGEMHLWRLVYVNAGVGLKMGLQYQDINITGNVGMRVAF

SEQ ID NO: 523 - DNA, 1075 bp, Helicobacter pylori
  CDS (32)...(1048)
ggaactctcatcaaaaaacaaggaacataatatgagacatggagatattagtagcagcccagatactgtgggtgtagcggtagttaattataagatgcctagactccacactaagaatgaggtgttggaaaattgtcgcaatatcgctaaggtgattggtggggtcaaacagggtttgcctgggttggatctgattattttccctgaatacagcacgcatgggattatgtatgacagacaagaaatgtttgatacagccgcaagcgttcctggagaagaaaccgcgatctttgctgaagcttgtaagaaaaacaaggtttggggagtgttctctttgacaggggaaaaacacgagcaagccaaaaagaatccctataacactttgattcttgtcaatgataagggtgagatcgtgcaaaaataccgcaaaatcttgccttggtgccctattgaatgttggtatcctggggataaaacttatgtggttgatgggcctaagggcttgaaagtttctttgattatttgcgatgatggaaactaccctgaaatttggcgcgattgcgcgatgcgtggggcagaactcattgtgcgctgtcaaggttacatgtatccggctaaggagcaacaaattgcaatagtaaaagctatggcgtgggccaatcaatgttatgtagcggtagcgaatgcgaccggttttgatggggtgtattcctattttgggcattctagcattattggttttgacgggcatactttgggcgaatgcggggaagaagaaaatggtcttcaatacgctcaactttctgtgcaacaaatccgtgatgcgagaaaatacgaccaaagccaaaaccaactcttcaaactcttgcacagaggttatagtggggtttttgctagtggcgatggggataagggtgtggcggaatgcccttttgagttctataaaacttgggtgaatgaccccaaaaaagctcaagaaaatgtagaaaaaatcacccgcccaagcgtgggtgtggccgcttgtcctgtgggcgatttgcccacgaaataaagggcaaaaggaggaggggggggg

SEQ ID NO: 524 - protein, 339 aa, Helicobacter pylori
MRHGDISSSPDTVGVAVVNYKMPRLHTKNEVLENCRNIAKVIGGVKQGLPGLDLIIFPEYSTHGIMYDRQEMFDTAASVPGEETAIFAEACKKNKVWGVFSLTGEKHEQAKKNPYNTLILVNDKGEIVQKYRKILPWCPIECWYPGDKTYVVDGPKGLKVSLIICDDGNYPEIWRDCAMRGAELIVRCQGYMYPAKEQQIAIVKAMAWANQCYVAVANATGFDGVYSYFGHSSIIGFDGHTLGECGEEENGLQYAQLSVQQIRDARKYDQSQNQLFKLLHRGYSGVFASGDGDKGVAECPFEFYKTWVNDPKKAQENVEKITRPSVGVAACPVGDLPTK

SEQ ID NO: 525 - DNA, 1722 bp, Helicobacter pylori
  CDS (40)...(1686)
atctctatcctttatagaatttgttgtggagactggcttatgaataatgtttttgttaagggtttgtttttttttcttttattgtttgggttttttttgaaagcttcagaaagcccaaacgctactcttaatccatctaaagaaaatgtttctgttgaagagcaaaagcgttttggaggcgttttagtttttgcaagaggcgctgatggctcgagcatggatcctgctttagtgactgatggcgaaagctatgtagcaacgggcaatatttatgacacgctcgtgcaattcagatacggcaccacagaagttgaacccgccttagcgacaagctgggacatatccccagatggtcttgtatatacctttcatttacgcaaaggggtttatttccaccaaacgaagtattggaataaaaaagtagagtttagcgctaaagatgtgctgttttcgtttgaacgccagatggataaagctaaacgatattatagcccgggggctaaaagctataagtattgggaaggcatgggcatgtctcatattattaagagcattgaagctttagatgactataccattagattcacacttaatgggccagaagccccgtttttagcgaatttgggcatggactttttgagcattttgagtaaggattacgctgattacctggctcaaaataataaaaaagacgagttggctaaaaaacctattgggacagggcctttcaaattctttttgtggaataaagatgaaaaaatcattcttttaaaaaatcaagattattgggggcctaaagcgtatttggataaggtggtggtgcgcaccattcctaattcttccactcgcgctttagcgttgcgcaccggcgaaatcatgctcatgactgggcctaatctcaatgaagtggagcaattagaaaaagtccctaatatcgtggtggacaaaagtgctgggttgttggcgagttggctttcgttgaacacgcaaaaaaagtattttgacaaccctttggtgcgtttggctatcaatcatgcgatcaatgcagatgattacatcaaagtgctttatgaaggctttgctcaaaaaatggtcaatcctttcccgcccaccatatggggttataactacaatatcaaaccctatgaatacgatttgaaaaaggctaaggagttgttgaaacaagcgggctatcctaacggctttaaaaccactatttttaccactgccactcgtaacccaaaaggagcggtgttcatacaggcgagcctggctaaaattggcattgatgtgaaaattgaagtgtatgagtggggggcttatttgaaaagaacgggtctgggcgaacatgaaatggcgttttcaggctggatggcagacattgcggatccggataatttcttatacaccttatggagcgagcaagccgcctcagctatacccactcaaaaccattccttttataaaaataaggagttttccaatctgctcataaaggctaaacgcgtttcggatcaaaaagagagggaagccctttatttaaaggcacaagaaattatccataaagacgcgccttatgtgcctttagcctatccttattcggtggtgccgcatttgtctaaagttaagggttataaaacgaccggagtgagcgtgaatcgcttctttaaggtgtatttagaaaaataaaaggggttgcatgctgagttttatcattaagcg

SEQ ID NO: 526 - protein, 549 aa, Helicobacter pylori
MNNVFVKGLFFFLLLFGFFLKASESPNATLNPSKENVSVEEQKRFGGVLVFARGADGSSMDPALVTDGESYVATGNIYDTLVQFRYGTTEVEPALATSWDISPDGLVYTFHLRKGVYFHQTKYWNKKVEFSAKDVLFSFERQMDKAKRYYSPGAKSYKYWEGMGMSHIIKSIEALDDYTIRFTLNGPEAPFLANLGMDFLSILSKDYADYLAQNNKKDELAKKPIGTGPFKFFLWNKDEKIILLKNQDYWGPKAYLDKVVVRTIPNSSTRALALRTGEIMLMTGPNLNEVEQLEKVPNIVVDKSAGLLASWLSLNTQKKYFDNPLVRLAINHAINADDYIKVLYEGFAQKMVNPFPPTIWGYNYNIKPYEYDLKKAKELLKQAGYPNGFKTTIFTTATRNPKGAVFIQASLAKIGIDVKIEVYEWGAYLKRTGLGEHEMAFSGWMADIADPDNFLYTLWSEQAASAIPTQNHSFYKNKEFSNLLIKAKRVSDQKEREALYLKAQEIIHKDAPYVPLAYPYSVVPHLSKVKGYKTTGVSVNRFFKVYLEK

SEQ ID NO: 527 - DNA, 1080 bp, Helicobacter pylori
  CDS (49)...(1050)
gcgtgaatcgcttctttaaggtgtatttagaaaaataaaaggggttgcatgctgagttttatcattaagcgtattttgtgggcgatccccacgctgtttggagtgagtatcattgtgtttatgatggtgcatttagtgccaggagatccggcattagtgattttaggtgaaaaggccaatcaagccgctattgatgctttaagagagcaatttggattgaataagcccttgatagagcagtattttttctttatcaataatgtgttgcatggcaattttggcacttctatcatgaccggtgagcctgtgatgcatgagttttggcaacgcttcccggccacggtggaattagctttgatcgctctgtttatggctcttgttttgggtattagcgttggcgtgttagctgcgatcaaacgctatagcgtgtttgattattccagcatgacttttgctttagccgggatttctatgccggtgttttggctagggctcatgctgatttatatctttagcgtgcaattggggtggttgcctgtttttgggcgtttgagcgatgtgtattatttagatggccccacaggtctttatttgatagacagcctgatcgcaagggattatggggcgtttatggatacgatcaagcacttgattttgcctagcattgtgttagccacggtttctaccgctgttattgccagaatgactcgcgcgagcatggcagaagtgtctaaagaagattatgtgcgtaccgctaaagctaaggggtgtagctcctttagggtgatttttgtgcacactttgcgtaatgctttaatccctgtaacgactatcgcaggcttgatgttggccgggcttttaggggggagcatgataactgaaacggttttctcatggcctgggattggtaagtggattgttaatgcgctcaaccagcgcgatttcccgattatccagtccatgtctttgattattgccatgatgtatattggggctaatctcttagtggatattttatacgcttttattgatcctagaataaggttgtcataatggagtcttttagagagtttatccaac

SEQ ID NO: 528 - protein, 334 aa, Helicobacter pylori
MLSFIIKRILWAIPTLFGVSIIVFMMVHLVPGDPALVILGEKANQAAIDALREQFGLNKPLIEQYFFFINNVLHGNFGTSIMTGEPVMHEFWQRFPATVELALIALFMALVLGISVGVLAAIKRYSVFDYSSMTFALAGISMPVFWLGLMLIYIFSVQLGWLPVFGRLSDVYYLDGPTGLYLIDSLIARDYGAFMDTIKHLILPSIVLATVSTAVIARMTRASMAEVSKEDYVRTAKAKGCSSFRVIFVHTLRNALIPVTTIAGLMLAGLLGGSMITETVFSWPGIGKWIVNALNQRDFPIIQSMSLIIAMMYIGANLLVDILYAFIDPRIRLS

SEQ ID NO: 529 - DNA, 955 bp, Helicobacter pylori
  CDS (32)...(892)
atcctaaacgcacctcttaaaaggagcttgcatgattttagaagttaaagatttaaaaacttattttttcaccgataagggcgtgaataaagcagtggatggtgtgagttttggtttgaaaaagtctcaaacgctctgcattgtaggggagagcgggagcgggaaaagcatcacttcgctctctattttagggttgattgaaaaaccgggtcaaattgtgggagggagcattcaatttttagggcaggatttgttgcaactcaaagaaaagcagatgcaaaaagaaattaggggtaaaaaaattggcatgatctttcaagagcctatgacaagcctaaacccttcctacacggtggggtttcaaatcaatgaagtgttgaaaatccaccaccctaacctcaataaaaaagaacgcttagaaagggtggtttatgaattagagcgtgtgggcattccccatgcaggggataaataccacgaataccctttcaatctcagcggggggcagcgccaaagggtgatgatcgctatggctatggtgtgtgagcctgaaatcttgatcgctgatgagcctacgacagccttagatgtaaccattcaagcgcaaattttagaattgatgaaagaattgcaacaaaaaaaaggcacttctattttgtttatcacccatgatttaggcgtggtggcgcaaatcgctgatgaagtggtggtgatgtataaagggcatgtggtggagcaagcgagtgcgaaagagctttttgctgatccaagacacccttatacgaaagctcttttaagcgcgatccctaaaccgggcaaagaataccgcaaaaaacgcttagagaccgtggatgaaaatgtggattatttgagttttcaaaaggagttgcgatgaagctcttagaaattaaagaattgaaaaaatcctatgcgatagacagggggttattcaagc

SEQ ID NO: 530 - protein, 287 aa, Helicobacter pylori
MILEVKDLKTYFFTDKGVNKAVDGVSFGLKKSQTLCIVGESGSGKSITSLSILGLIEKPGQIVGGSIQFLGQDLLQLKEKQMQKEIRGKKIGMIFQEPMTSLNPSYTVGFQINEVLKIHHPNLNKKERLERVVYELERVGIPHAGDKYHEYPFNLSGGQRQRVMIAMAMVCEPEILIADEPTTALDVTIQAQILELMKELQQKKGTSILFITHDLGVVAQIADEVVVMYKGHVVEQASAKELFADPRHPYTKALLSAIPKPGKEYRKKRLETVDENVDYLSFQKELR

SEQ ID NO: 531 - DNA, 894 bp, Helicobacter pylori
  CDS (37)...(840)
aaatgtggattatttgagttttcaaaaggagttgcgatgaagctcttagaaattaaagaattgaaaaaatcctatgcgatagacagggggttattcaagcctaaaagagtgatccatgcgctcaatgggatcagttttgaagtggaacaaaatgaagttttgagcattgtgggggagagcggttgcgggaaaagcacgacagccaaaattttagccgggattgaaaggcaagatagcggggcgatttatttcaatggtaagcgccatttgcattttagcaaacaggattggtttgattaccgcaaaaaggtgcaaatgatttttcaagacccttattctagcctaaaccctcggtggaaagtgggcgagatcatcgctgaacccttgcttttaaattctcatttttcaaaaaaagaaatcaaaacaaaagtgctagagatcatgcaaaaagtgggcttgaaattagaatggatcgatcgttacccccaccaattttcaggcggtcaaaggcaacgaatcggcattgctagggcgctcattttgcatcctagcgtggtgatttgcgatgagcctgtgtctgcgctagacgtgtccattcaagcgcaagtgttgaatttgctcttggatttgcaaaaagaaatggggctgacttatatttttatcagccatgatttaggggtggtggagcatataagcgataaaatcatcgtaatgaatcaggggcaaatcgtagaaacgggggatgtggatagcgtgataagcgctccaaagcacccttatacgcagaaattactcaatgcggtgccgcatttggaaaaatccatgcaaagatttgccaaataaaagaaaggatttttaagctgtgtttgtagatagcgtggaaattatcatcgc

SEQ ID NO: 532 - protein, 268 aa, Helicobacter pylori
MKLLEIKELKKSYAIDRGLFKPKRVIHALNGISFEVEQNEVLSIVGESGCGKSTTAKILAGIERQDSGAIYFNGKRHLHFSKQDWFDYRKKVQMIFQDPYSSLNPRWKVGEIIAEPLLLNSHFSKKEIKTKVLEIMQKVGLKLEWIDRYPHQFSGGQRQRIGIARALILHPSVVICDEPVSALDVSIQAQVLNLLLDLQKEMGLTYIFISHDLGVVEHISDKIIVMNQGQIVETGDVDSVISAPKHPYTQKLLNAVPHLEKSMQRFAK

SEQ ID NO: 533 - DNA, 1141 bp, Helicobacter pylori
  CDS (62)...(1087)
ttaagctgtgtttgtagatagcgtggaaattatcatcgcttcgggtaagggggggcctggaatggtgagttttaggcgagaaaaatttgtcatcaaaggaggccctgatgggggcgatggaggcgatggaggcgatgtgtattttgaagtggataacaataccgacactctagcgagttttagaggcaccaaacaccataaggctaaaaatggggctccaggaggtacacgaaattgcgcgggcaaaaagggcgaagacaagatcattgtcgtgccaccaggaacgcaggtttttgtaggtgatgagttgtggcttgatttagtggaacctaaagaaagggtgttagccttaaaagggggcaagggggggttagggaatgcacattttaaaagcgcgactaaacaacaacccacttacgcgcaaaaaggcttagagggggttgaaaaatgcgtgcgtttggaattaaaactcatcgctgatatagggttagtgggcttccctaatgcgggtaaatccacgctcatttccaccatctctaacgctaagcctaaaatcgctaactatgaatttacgactctagtgcctaatttaggggttgtgagcgtggatgaaaaaagcggatttctaatggcggatattcctggcattattgaaggggctagcgagggaaagggcttagggattagctttttaaagcatattgaacgcaccaaagttctagcttttgttttagacgcttccaggctggatttaggcattaaagagcaataccaacgcttgaggttggagttggaaaaattttcatccgctttggccaataagccttttggggtgttgctcaataaatgcgatgttgtagaaaacattgatgagatgactaaggatttttgtgcctttttaaatttgggagcgcagaaattaaacgagtttggtttagagccgtatttagggtttttgcacccccatttaaccaatgattttgaaaataaccctaatgagcaatcagcgctctttgtcttgcccctttcagcggttagcgctcttaatgtgcatgcactcaaatttgtgttgttggaagcgttaccctaaaacgctatttttaaaataatccattaaaataaaggcgaggaatgaaaagat

SEQ ID NO: 534 - protein, 342 aa, Helicobacter pylori
MVSFRREKFVIKGGPDGGDGGDGGDVYFEVDNNTDTLASFRGTKHHKAKNGAPGGTRNCAGKKGEDKIIVVPPGTQVFVGDELWLDLVEPKERVLALKGGKGGLGNAHFKSATKQQPTYAQKGLEGVEKCVRLELKLIADIGLVGFPNAGKSTLISTISNAKPKIANYEFTTLVPNLGVVSVDEKSGFLMADIPGIIEGASEGKGLGISFLKHIERTKVLAFVLDASRLDLGIKEQYQRLRLELEKFSSALANKPFGVLLNKCDVVENIDEMTKDFCAFLNLGAQKLNEFGLEPYLGFLHPHLTNDFENNPNEQSALFVLPLSAVSALNVHALKFVLLEALP

SEQ ID NO: 535 - DNA, 621 bp, Helicobacter pylori
  CDS (16)...(567)
attaaaggataatgaatgaaaaaaatggttttggtatcggttttactagcagggtttttgcaagcggtgaatttggatttatcttcggctaagctaacatggacagcctttaaaactaaggctaaaacaccagtaaatgggagttttgaaagcatcacctataaattgggtaaatctcaagatagtttaaaaacccttttagagggagcgagcgcgagcatggatagcttgaaagtcaatttaggcgatgaattgaaaaacaaaaatgtgaaagaagcttttttcgctctttttaaaaacactaacatcaaagtaactttcaggaatgtgatagaaggcgatcatgcaggttctcttacggcttatgtgagaatgaatgaaaagctggtgaaagtgcctatgcaatacacgattgctgaggataagatcgtggttaaaggggttttggatttattgaattttggcttgaaaaacgaattagcgagcttggccaaacgatgcgaaagctttcatgagggcttgacttggtcgcaagtggaaatccaatttgaaagcatgatcaagggataatgtaaaatcatggagttgttgcacagcattaatgatttcaatgaagctaag

SEQ ID NO: 536 - protein, 184 aa, Helicobacter pylori
MKKMVLVSVLLAGFLQAVNLDLSSAKLTWTAFKTKAKTPVNGSFESITYKLGKSQDSLKTLLEGASASMDSLKVNLGDELKNKNVKEAFFALFKNTNIKVTFRNVIEGDHAGSLTAYVRMNEKLVKVPMQYTIAEDKIVVKGVLDLLNFGLKNELASLAKRCESFHEGLTWSQVEIQFESMIKG

SEQ ID NO: 537 - DNA, 1406 bp, Helicobacter pylori
  CDS (49)...(1338)
caagtggaaatccaatttgaaagcatgatcaagggataatgtaaaatcatggagttgttgcacagcattaatgatttcaatgaagctaagcaggtgatcgctgggggggtcaattcacctgttagggcgtttaagagcgttaaaggcactcccccctttattttaaaaggcaagggggcgtatctttatgatgtggataacaaccattatatagattttgtgcaaagctgggggcctttgatttttgggcatgctgatgaagagattgaagaaaatattattaatgcattaaaaaaaggcacttcttttggcgctcccacagaattagaaaccactttagctaaggaaatcatttcttgttatgaaggcttagataaggtgcgtttagtcagtagcggcacagaagcgaccatgagcgcgatacgactcgctagagcttatagccaaaaagatgatttgatcaagtttgaagggtgctaccatgggcatagcgactccttattggtgaaagcgggtagcgggtgtgctacttttggatcgccttcttctttaggcgtgccgaacgattttagcaaacacactctagtggctcgttataacgatttaaactccacagaagaatgctttaaaaaaggcaatgtgggttgcgtcatcattgaacccattgccgggaatatggggttagtgccggctcaaaaagagtttttattgggcttaaaggccttgtgtgaaaaataccaagcggtgctgattttagatgaagtgatgagcggttttagagcgagcttgagcggttcgcaagaattttatggcgtggtgccggatttggtaacctttggtaaggtgataggtgctgggcttcctttggcgtgttttggagggcgtgcagaaattatggacttgctttcgcccattggaagcgtgtatcaagcaggcactttgagcggtaaccccctagcggtgtgcgcggggttgagtgcgctttataaaatcaaaagagacaaaaccctttatactcgcttagacgctttagctattcgtttgactcaaggcttacaaaagagcgctcaaaactataacatcgctttagagacgcttaacatggggagcatgtttggctttttctttaacgaaaatgcggtgcacgattttgatgacgctttaaaaagcgatacggagatgtttgcaaaattccaccaaaaaatgctctttaagggcgtgtatttggcgtgctcaagctttgaaaccggctttatttgtgagcctatgactgaagagatgattgatttaacgatcgcaaaagccgatgaaagttttgatgaaatcataaaaggtgtgtgaattttttgaaaaagccaaagtattataaattcatagagggggcgaattatttgagcttggggctt

SEQ ID NO: 538 - protein, 430 aa, Helicobacter pylori
MELLHSINDFNEAKQVIAGGVNSPVRAFKSVKGTPPFILKGKGAYLYDVDNNHYIDFVQSWGPLIFGHADEEIEENIINALKKGTSFGAPTELETTLAKEIISCYEGLDKVRLVSSGTEATMSAIRLARAYSQKDDLIKFEGCYHGHSDSLLVKAGSGCATFGSPSSLGVPNDFSKHTLVARYNDLNSTEECFKKGNVGCVIIEPIAGNMGLVPAQKEFLLGLKALCEKYQAVLILDEVMSGFRASLSGSQEFYGVVPDLVTFGKVIGAGLPLACFGGRAEIMDLLSPIGSVYQAGTLSGNPLAVCAGLSALYKIKRDKTLYTRLDALAIRLTQGLQKSAQNYNIALETLNMGSMFGFFFNENAVHDFDDALKSDTEMFAKFHQKMLFKGVYLACSSFETGFICEPMTEEMIDLTIAKADESFDEIIKGV

SEQ ID NO: 539 - DNA, 1100 bp, Helicobacter pylori
  CDS (90)...(1052)
aaggcgcaaaacttagccaaaaaagagatggacgcactagattctcatctgttagcgtttttaaatcaaaatgcaaatgccattcactgatgcccaaaatccctatcacgctcatcaccggttttttaggcagcggtaaaacgagttttttgagcgaatatttaaaccaaacagatcaccaaggcgtcgctcttatcatcaatgaaatcggtcaagccgctttggatcagcgcatcttaagcgttcaatattgcggtgaaaaaatgctctatcttaacgcagggtgcgtgtgttgcaacaaacgcttggatttagtggagtctctaaaagccacgctcaacaactatgaatggcacggcgaaattctaaggcgcatcatcattgaaactaccggtttagccaacccggcaccgattttatggacgattttgagcgacacttttttaggagtgcattttgagattcaaagcgtggtggcttgcgtggatgcattgaatgctagagagcatttaaccaacaatgaagctaaagagcaaatcgtttttgctgatagcgttttattgaccaaaacggatttacaaaacgatagcgcggctttaacaaaactaaaagagaggatacaagcccttaaccctagtgcagaaatttttgacaagagggcgatagactatgagagcctcttttcacgcaaaaatagggcgcgaaattttatgccaagaatgccaaaagattcgcactcgcaaggctttgagactttaagcattaattttgaaggcacgatggagtggagcgcgtttgggatttggctgagtttgttattgcatcaatacggcacacagattttacgcatcaaggggattattgacattggaagcggctttttggtgagtattaacggcgtgatgcatgtcatttacccgcctaagcatattttaaaggatcaaaacggctctaacctcgtttttatcatgcgccatttagagcgtgaaaaaatcttaaattccttaaagggttttaaggattttctcggcatcaagggttttgaaacccaataatttttctatttatggatagctgtttgcattttgatggggaaaaga

SEQ ID NO: 540 - protein, 321 aa, Helicobacter pylori
MPKIPITLITGFLGSGKTSFLSEYLNQTDHQGVALIINEIGQAALDQRILSVQYCGEKMLYLNAGCVCCNKRLDLVESLKATLNNYEWHGEILRRIIIETTGLANPAPILWTILSDTFLGVHFEIQSVVACVDALNAREHLTNNEAKEQIVFADSVLLTKTDLQNDSAALTKLKERIQALNPSAEIFDKRAIDYESLFSRKNRARNFMPRMPKDSHSQGFETLSINFEGTMEWSAFGIWLSLLLHQYGTQILRIKGIIDIGSGFLVSINGVMHVIYPPKHILKDQNGSNLVFIMRHLEREKILNSLKGFKDFLGIKGFETQ

SEQ ID NO: 541 - DNA, 1713 bp, Helicobacter pylori
  CDS (26)...(1648)
ttaaaagcaaacaagaaagttaagcatgcacactctcattaagggcattttagaagagattttagaagaagaagtcattgttgaataccctaaagacagagagcatgggcattacgctacgcccattgctttcaatctcgccaaagtttttaaaaaatcgcccttagccatcgctgaagagttagcccttaaaatcagcacgcatgaaaaaactcaagggctttttgacagcgtagtggcttgtaagggctatatcaatttcacgctttctttagattttttggagcgtttcacccaaaaagctttggaattgaaagaaaaatttggctctcaagttaaaagcgaacgttctcaaaaaatctttttagaatttgtgagcgctaaccccacagggcctttacacatagggcatgctagaggggcggtgtttggcgatagtttggctaaaatcgctcgctttttagggcatgaagttttatgcgagtattatgtcaatgacatgggatctcaaatccgcttgttagggctttctgtatggctcgcttacagagaacatgttttaaaagaaagcgtaacttacccagaagtcttttacaaaggcgaatacatcattgaaatcgctaaaaaggcgaacaacgatttagaaccaagccttttaaaagaaaacgaagaaacgattattgaagttttaagcggctatgctagggatctaatgcttttagaaattaaagataatttagacgctttaggcattcattttgattcctatgcgagcgaaaaagaagtttttaaacataaagatgcggtgtttgaacaattagaaaaagcgaacgccctttatgaaaaggattctaaaatctggctcaaatcttcactctaccaggatgaaagcgatcgggtgctcattaaagaagataaaagctacacttatttagcgggcgatattgtctatcatgatgaaaaattcaagcaagattataccaaatacatcaacatttggggggcagaccaccacggctatatcgctagagtgaaagccagccttgagtttttgggctatgattccaacaagcttgaagtcttgctcgctcaaatggtgcgcttgctcaaagataacgagccttacaagatgagtaaaagagcgggtaattttattttgattaaagatgtggttgatgatgtgggtaaggacgctttgaggtttatttttttgagcaaacggcttgacactcatttagaatttgatgtcaatactttaaaaaagcaagacagctcaaaccccatttactatatccattacgctaattcgcgcatccacaccatgctagaaaaatcgcccttttctaaagaagaggttttgcaaacccctttaaccaatttaaacgctgaagaaaaatacttgctttttagcgctttaagcttgcctaaagcaattgaatcctcttttgaagaatacggcttgcaaaaaatgtgcgaatacgcaaaaaccctcgcatcagaattccaccgcttctataacgctggcaaaatcttagacacccctaaagctaaagagcttttaaaaatttgtttaatagtaagcttgagcttaagcaacgcttttaaacttttaggcatagagataaagaccaaaatttccgctagagattaagccaatatttaattttttgttataacattccccttattttttgaaactaaggagaatattat

SEQ ID NO: 542 - protein, 541 aa, Helicobacter pylori
MHTLIKGILEEILEEEVIVEYPKDREHGHYATPIAFNLAKVFKKSPLAIAEELALKISTHEKTQGLFDSVVACKGYINFTLSLDFLERFTQKALELKEKFGSQVKSERSQKIFLEFVSANPTGPLHIGHARGAVFGDSLAKIARFLGHEVLCEYYVNDMGSQIRLLGLSVWLAYREHVLKESVTYPEVFYKGEYIIEIAKKANNDLEPSLLKENEETIIEVLSGYARDLMLLEIKDNLDALGIHFDSYASEKEVFKHKDAVFEQLEKANALYEKDSKIWLKSSLYQDESDRVLIKEDKSYTYLAGDIVYHDEKFKQDYTKYINIWGADHHGYIARVKASLEFLGYDSNKLEVLLAQMVRLLKDNEPYKMSKRAGNFILIKDVVDDVGKDALRFIFLSKRLDTHLEFDVNTLKKQDSSNPIYYIHYANSRIHTMLEKSPFSKEEVLQTPLTNLNAEEKYLLFSALSLPKAIESSFEEYGLQKMCEYAKTLASEFHRFYNAGKILDTPKAKELLKICLIVSLSLSNAFKLLGIEIKTKISARD

SEQ ID NO: 543 - DNA, 896 bp, Helicobacter pylori
  CDS (38)...(835)
aagtagagattatattacctagatagtgaatcaacgaatgaaaagccacttccaatacagcacgctagaaaatatccctaaagcctttgacattctcaaagacccccctaaaaaactctattgtgtgggcgataccaagcttttggacacgcctttaaaagtggcgatcataggcacaagaagacccaccccttacagcaagcaacacacgatcactctagctagagagcttgctaaaaatggcgcggttattgtgagtgggggagcgttaggcgtggatattatcgctcaagaaaacgccttgccaaaaacgatcatgctttcgccttgcagtttggatttcatctatcctacgaacaatcataaagtgatccaagaaatcgcgcaaaacggcttgattttaagcgaatatgaaaaggatttcatgcccattaaaggctcttttttggcgagaaaccgcctggtgatcgctttaagcgatgtggtgattatcccccaagcggatttaaaaagcggctctatgagcagcgcgagattagcccagaaataccaaaagcctttatttgttttaccccaacgcctgaatgagagcgatggcactaatgagcttttagaaaaagggcaggctcaagggatatttaatattcaaaattttataaacacccttttaaaagactaccatttaaaagaaatgcctgaaatggaagatgaatttttagaatattgtgccaaaaacccgagctatgaagaagcgtatctcaaatttggggataagcttttagaatacgagctgttgggtaagatcaagcgcatcaatcacattgtggtgttagcgtgattttggcatgcgatgtggggttaaaacgcattggcatcgctgcgcttttaaatggcgt

SEQ ID NO: 544 - protein, 266 aa, Helicobacter pylori
MKSHFQYSTLENIPKAFDILKDPPKKLYCVGDTKLLDTPLKVAIIGTRRPTPYSKQHTITLARELAKNGAVIVSGGALGVDIIAQENALPKTIMLSPCSLDFIYPTNNHKVIQEIAQNGLILSEYEKDFMPIKGSFLARNRLVIALSDVVIIPQADLKSGSMSSARLAQKYQKPLFVLPQRLNESDGTNELLEKGQAQGIFNIQNFINTLLKDYHLKEMPEMEDEFLEYCAKNPSYEEAYLKFGDKLLEYELLGKIKRINHIVVLA

SEQ ID NO: 545 - DNA, 459 bp, Helicobacter pylori
  CDS (82)...(408)
taaaacgctcttgaaagggtgagcgtggaatttgcttctatcgtttggttgctcatagtcaatattctgatttttattctcatgctggtggataaaaattcggctgatcaaaaaatgtggcgtattcctgaaaaagctttgtgggttttatcgctccttggcgggtctgtcgggtttttggtcgctatggttgtgtcccaccataagatcttaaagcctgagtttaaatacggcgtttcgctcatttacttgatagagagcacaatcctttactttgtcagcaaagatctttcttggatagtagcgctaacgatattctcactatctttgatactggtagcgtttaagatcttcctccttaaagacaaccctaacaaacgcttcaaaaacaacaagagggataaaaaataatgtcttatttttttaaaatcattctgggcacaagcgtgatcgtggggg

SEQ ID NO: 546 - protein, 109 aa, Helicobacter pylori
MLVDKNSADQKMWRIPEKALWVLSLLGGSVGFLVAMVVSHHKILKPEFKYGVSLIYLIESTILYFVSKDLSWIVALTIFSLSLILVAFKIFLLKDNPNKRFKNNKRDKK

SEQ ID NO: 547 - DNA, 399 bp, Helicobacter pylori
  CDS (47)...(379)
agcgctcaaatcatttattggttatcaaaatattttaggagtgagtatggaaaatgatgttaaagaagatctagagcaagcaagaccaaagttagagccagaaaagcaaaagcaagagccagaggaacagaaacaagaaaaacaagacaaacaagagcagaagccaaagcaagaaaaagaagagtcaaagagcaaggaacaagaagaaaacaaaaaacaaaagagatctagctatattttttggggatgtattattggtttgtgtatagttgttattattgccaaaattattgcgtttggcggatctagtgaggaggcaaaagcagacaaaccaaaaaactctttaagtatgctgaaaaacttttacctaccgatattataaaagataatcttaataac

SEQ ID NO: 548 - protein, 111 aa, Helicobacter pylori
MENDVKEDLEQARPKLEPEKQKQEPEEQKQEKQDKQEQKPKQEKEESKSKEQEENKKQKRSSYIFWGCIIGLCIVVIIAKIIAFGGSSEEAKADKPKNSLSMLKNFYLPIL

SEQ ID NO: 549 - DNA, 1627 bp, Helicobacter pylori
  CDS (21)...(1568)
tctaaatcctaatctaacaaatgaaacaaaagcttaaagctcaaatcaaagagcgcatggcttctatcgcttataatgaaaaagggtttcctagcccctttttatttaaagacttgaaaaaagccgcgctcaaaatcatagaagccatgcgcacaaacacagaaattttagtggtgggcgattatgacgctgacggcgtgattagctctgctatcatggcaaaattttttgaaagcctgaactataagcatgtccgcattgcaatccctaatcgcttcatggatggctatgggatttctaaaaaatttttagaaaaacaccacgcccctttaatcatcacggtggataacgggattaacgcctttgaagccgcgcgattttgtaaagaaaaaaattacacccttatcatcacagatcaccattgcttacaccatgatgaagtcccagacgcttatgcggtgatcaaccccaagcaaccggattgtgattttatccaaaaggaagtgtgcggggcgttggtagcgttttatttgtgctatgggatccatcagcttttaggaaaagaaaaaagccattctagtgagttattatgtttagcgggcgtggcgactattgctgacatgatgcctttgactttttttaaccgctttttagtttctaaagccttgtattttttgcaaaaagaatccttaggggcgatgggttttttgcgccaaagagaagtttttagaaaacgctctttaaaagcgagtgatatttcttttaatatcgcccccttaatcaactccgcagggcgcatgcaagatgcgaaaatggctttagattttttaagcgcgaataattctcaagatggctattctttgtatgaacgcttgaaagcatgcaatttgaagcgtaaaatgatccaacagcaggtttttgaagaagcttttaagcatgcgatggttggagaaaaaattatcgtcgcttttaaggacaattggcatgagggagtgctggggattgtggcttcaaaattagtggaagccactcaaaagccaagcctggtttttacctttaaagaaggggtgtataaagggagcgctcgtagctcttcaaacattgacttgattgacgctttgaatggggtttcttctttattgctcggctatggagggcataggcaagcttgcgggttgagcgttgaaaaaaacaatatcatctcgctctttgaaactttagaaaattttgattttaaagttttacctttttgtaaaacagagccccctttaacgctcaaattaaaagacattgacagagagcttttagagattatagaaatgggcgaaccttatgggcaagaaaaccctgaacccctattccaagcaaaaaatttagaagtcatagaagaaaaaatcattaaagaaagccaccaggttttgcgttttaaggataaagaatgcgtcaaagaggctatttattttagcgctgagcggtttttgaaagcgggcgaaaaggtgagcgtgctttttagcgtggaattagatgagtgttctaatgagcctaaaatgtttgttaaaagtttgttgtagtgccttttgttgaagaagaatttgaaattttaaaacccaccaaagccttgtttttt

SEQ ID NO: 550 - protein, 516 aa, Helicobacter pylori
MKQKLKAQIKERMASIAYNEKGFPSPFLFKDLKKAALKIIEAMRTNTEILVVGDYDADGVISSAIMAKFFESLNYKHVRIAIPNRFMDGYGISKKFLEKHHAPLIITVDNGINAFEAARFCKEKNYTLIITDHHCLHHDEVPDAYAVINPKQPDCDFIQKEVCGALVAFYLCYGIHQLLGKEKSHSSELLCLAGVATIADMMPLTFFNRFLVSKALYFLQKESLGAMGFLRQREVFRKRSLKASDISFNIAPLINSAGRMQDAKMALDFLSANNSQDGYSLYERLKACNLKRKMIQQQVFEEAFKHAMVGEKIIVAFKDNWHEGVLGIVASKLVEATQKPSLVFTFKEGVYKGSARSSSNIDLIDALNGVSSLLLGYGGHRQACGLSVEKNNIISLFETLENFDFKVLPFCKTEPPLTLKLKDIDRELLEIIEMGEPYGQENPEPLFQAKNLEVIEEKIIKESHQVLRFKDKECVKEAIYFSAERFLKAGEKVSVLFSVELDECSNEPKMFVKSLL

SEQ ID NO: 551 - DNA, 961 bp, Helicobacter pylori
  CDS (51)...(908)
atcgtaatgaaataatcaccacccctataagctttgtagcgacggctaacatgcttttagaaagcggttatacacccgtatttgctggaattaaaaacgatggcaatatagatgaattagccctagaaaagctcattaacgaaagaaccaaagccatagtgagcgtggattatgccggtaaaagcgtggaagtagaaagcgttcaaaagctttgcaaaaagcattctttgagctttctttctgacagctcgcatgctctaggaagcgagtatcaaaacaaaaaagtaggaggctttgcgttagcgagcgtgtttagtttccatgccattaagcccatcactacggctgaagggggagcggtcgttactaacgatagcgaattgcatgaaaaaatgaaattgtttcgctctcatggcatgctcaaaaaagatttttttgaaggcgaagtcaaaagcatagggcataacttccgcttgaatgaaatccaaagcgctttgggtttgagccagcttaaaaaagccccctttttaatgcaaaaaagagaagaagccgctctaacctatgacaggatttttaaagataacccttatttcacccctttacaccccttgttaaaagataaaagctctaaccacctttatcctattttaatgcaccaaaaattttttacatgcaaaaaactcattttagaaagtttgcacaagcgtggcattttagcccaagtgcattacaagcccatttatcaataccaattgtaccaacagctcttcaatacagccccattaaaaagcgcagaggatttctatcacgctgaaatttccttgccttgtcatgcgaatttaaatttagagagcgttcaaaacatcgctcatagcgttttaaaaacttttgagagttttaaaatagaatgagtttcatttagggcttcaaatcttaatcattaagaatggtgcggaagaaa

SEQ ID NO: 552 - protein, 286 aa, Helicobacter pylori
MLLESGYTPVFAGIKNDGNIDELALEKLINERTKAIVSVDYAGKSVEVESVQKLCKKHSLSFLSDSSHALGSEYQNKKVGGFALASVFSFHAIKPITTAEGGAVVTNDSELHEKMKLFRSHGMLKKDFFEGEVKSIGHNFRLNEIQSALGLSQLKKAPFLMQKREEAALTYDRIFKDNPYFTPLHPLLKDKSSNHLYPILMHQKFFTCKKLILESLHKRGILAQVHYKPIYQYQLYQQLFNTAPLKSAEDFYHAEISLPCHANLNLESVQNIAHSVLKTFESFKIE

SEQ ID NO: 553 - DNA, 728 bp, Helicobacter pylori
  CDS (15)...(692)
  misc_feature 528: n = A,T,C or G
taatgggcctttgaatgcgttttgtctatcaccctttagccaaagagcctgttttaaaaatagaaggcgagagttatacgcatttataccgatcaaggcgtgtcaaaagtgcgagtcgtttggatttgagaaatttaaaagacggctttttatacacctatgagcatgcagaaatcactaaaaaacacgcccttttaaagctagtgggcgcgcgattattagaggttatggccagtaaaaaaacgcatttgattttaagcgtgattgaaatcaaaaacattgaaaaaatcctaccctttttaaatcagttaggcgtgagcaagttgagtttattctatgcggattttagccaacgcaatgaaaaaatagacatcgctaaattagagcgctttcaaaagattttgatccattcttgcgagcagtgtggtaggagtgctttaatggaattggaagtgttttcaaacactaaagaggcgctaaaagcctatcctaaggcgagcgttttggattttaagggcgaaaccttanccgcaagcgcggattttgaaaagggcgttatcatagggcctgaggggggctttagcgaaccagaaagagggtattttaaagagcgtgaaatttatcgcatcccgttagatatggtgctaaagtctgagagtgcatgcgtgtttgtagcgagtatcgcacaagtttagggggttattggggattttaaatcctaaaaaatc

SEQ ID NO: 554 - protein, 226 aa, Helicobacter pylori
  VARIANT 172: Xaa = Any Amino Acid
MRFVYHPLAKEPVLKIEGESYTHLYRSRRVKSASRLDLRNLKDGFLYTYEHAEITKKHALLKLVGARLLEVMASKKTHLILSVIEIKNIEKILPFLNQLGVSKLSLFYADFSQRNEKIDIAKLERFQKILIHSCEQCGRSALMELEVFSNTKEALKAYPKASVLDFKGETLXASADFEKGVIIGPEGGFSEPERGYFKEREIYRIPLDMVLKSESACVFVASIAQV

SEQ ID NO: 555 - DNA, 888 bp, Helicobacter pylori
  CDS (13)...(840)
ttatgaaattgaatgaccctttcgcaagccctaaacaaagccaaaaaaggattatcgcaaaaaggttttagggggggcttagaatctgaaattttattaggctttgtcttgcaaaaagaaagggtttttttgcacacgcatgcctatttagagttaaaccacgaagaagaggtgcgtttttttgaattggtagaaaagcgcttgaataactgccccatagagtatttattagaaagctgtgatttttatgggcgctctttttttgtgaatgagcatgttttaatcccacgacctgaaaccgagattttggtccaaaaagcccttgatattatttctcaataccatttaaaagagataggcgaaatcggcatagggagcggatgcgtgtctgtgagtttggctttagaaaaccctaatctctctatttatgcgagcgatatttcaccaaacgctttagaagtggcgtccaaaaatattgagcacttttgtctaaaagagcgtgtttttttaaaacaaacacgcctttgggatcatatgcccatgatagaaatgcttgtctctaacccgccctatatcgctagaaattatcctttggaaaaatccgtcctcaaagaaccgcatgaagccctttttgggggggttaaaggcgatgagatcttaaaagaaatcgtttttttagccgctaaattaaaaatcccttttttggtttgtgaaatggggtatgaccagttgaaaagcttgaaagaatgcttggaattttgcggttatgatgcagagttttacaaggatttgagcggctttgatagagggtttgtgggcgttttaaaaagttttttaagataaattaaaacttaattacccttttagtgttacaataaaaacacttaa

SEQ ID NO: 556 - protein, 276 aa, Helicobacter pylori
MTLSQALNKAKKGLSQKGFRGGLESEILLGFVLQKERVFLHTHAYLELNHEEEVRFFELVEKRLNNCPIEYLLESCDFYGRSFFVNEHVLIPRPETEILVQKALDIISQYHLKEIGEIGIGSGCVSVSLALENPNLSIYASDISPNALEVASKNIEHFCLKERVFLKQTRLWDHMPMIEMLVSNPPYIARNYPLEKSVLKEPHEALFGGVKGDEILKEIVFLAAKLKIPFLVCEMGYDQLKSLKECLEFCGYDAEFYKDLSGFDRGFVGVLKSFLR

SEQ ID NO: 557 - DNA, 1026 bp, Helicobacter pylori
  CDS (28)...(960)
ccatctcaaaataaggacgcctaaatcatggcagaaaaaacagctaacgatttaaaactaagtgagatagaactcgtggattttcgtatttatggcatgcaagagggcgtcccttatgaggggatttatggtatcaatgtggctaaagtccaagaaatcatccccatgcccaccctttttgaataccccacgaatttggattacattatcggcgtgtttgatttgcgctccataatcattccgcttatagacttggctaaatggatagggattatcccagataaaagcaaggaaaacgaaaaaatcgtcattatcactgaatttaacaacgttaaaatgggttttttagtccattcggctaggcgtatcaggcgcattagctggaaagatgtggagcctgcatcctttagcgcctctaatagcatcaataaagaaaatattaccggcacgacacgcattgaaaacgacaaaaccctgctcattttggatttagaaagcattttagacgatttaaagcttaatgaagacgctaaaaacgctaaagatacccataaagagcgttttgaaggcgaagtgttgtttttagacgatagcaagaccgcaagaaaaaccttaaaaaaccatttgagcaaattaggttttagcatcactgaagctgtggatggggaagacgggttgaacaaattagaaatgttattcaaaaaatacggggacgatttgagaaagcatttgaaattcattatttcagatgttgaaatgcctaaaatggatggctatcatttcttattcaagctccaaaaagaccctaggtttgcttatattcctgtgatttttaattcttctatttgcgataattacagcgctgaaagggctaaagaaatgggggctgtagcgtatttagtcaagtttgacgcagaaaaattcaccgaagaaatttctaagattttagacaagaatgcgtaattctttttataaaattgtaaaatactcttatctcaaacgctaaaaaggggttttaaatggatg

SEQ ID NO: 558 - protein, 311 aa, Helicobacter pylori
MAEKTANDLKLSEIELVDFRIYGMQEGVPYEGIYGINVAKVQEIIPMPTLFEYPTNLDYIIGVFDLRSIIIPLIDLAKWIGIIPDKSKENEKIVIITEFNNVKMGFLVHSARRIRRISWKDVEPASFSASNSINKENITGTTRIENDKTLLILDLESILDDLKLNEDAKNAKDTHKERFEGEVLFLDDSKTARKTLKNHLSKLGFSITEAVDGEDGLNKLEMLFKKYGDDLRKHLKFIISDVEMPKMDGYHFLFKLQKDPRFAYIPVIFNSSICDNYSAERAKEMGAVAYLVKFDAEKFTEEISKILDKNA

SEQ ID NO: 559 - DNA, 753 bp, Helicobacter pylori
  CDS (32)...(697)
gatctataaagaatagccataaagaagaattatgttagattatcgccaaaaaattgatgctctcatcaccaaaatagaaaaggctcgcaccgcctattcaaggcaccacattgtcaaaatcgtggctgtttcaaaaaacgcttccccagaagctatccaacattattataactgctctcaaagggcttttggagaaaataaagttcaagatttaaaaactaaaatgcattctttagagcatttgccccttgaatggcacatgataggctctttacaagaaaataaaatcaatgcgcttttgagtttaaagcccgctcttttgcattctttagactctttaaaactcgctttgaaaatagaaaagcgttgcgaaatattgggcgtcaatttaaacgctcttttacaggttaatagcgcgtatgaggaaagtaaaagcggggtggtgcctgaagaagcgctagaaatttattctcaaatcagtgaaacttgcaagcacctcaagcttaaggggcttatgtgtataggggcacacacagatgatgaaaaggaaattgaaaaatcctttatcaccaccaaaaagctttttgaccaaataaagaatgcgagcgttctttcaatgggcatgagtgatgattttgaattagcgattgcttgcggggcgaatcttttaaggattggctcttttttgttcaaagagtaagatgctagaaacttatgcacttaaaaatggggctgtttttatctctgatgcgc

SEQ ID NO: 560 - protein, 222 aa, Helicobacter pylori
MLDYRQKIDALITKIEKARTAYSRHHIVKIVAVSKNASPEAIQHYYNCSQRAFGENKVQDLKTKMHSLEHLPLEWHMIGSLQENKINALLSLKPALLHSLDSLKLALKIEKRCEILGVNLNALLQVNSAYEESKSGVVPEEALEIYSQISETCKHLKLKGLMCIGAHTDDEKEIEKSFITTKKLFDQIKNASVLSMGMSDDFELAIACGANLLRIGSFLFKE

SEQ ID NO: 561 - DNA, 1633 bp, Helicobacter pylori
  CDS (22)...(1593)
ttttaaattcaaaggataaaaatgtatcaagtagccatttgcgaccccatccatgctaaaggcattcaaattttagaagctcaaaaagacattgtcttgcatgattattccaaatgccctaaaaaggagcttttagaaaaactcactcccatggatgcgctcatcactcgcagcatgacccctatcacaagcgattttttaaagcccttaacccacttaaaatccatcgtgagagcgggcgtgggagtggataatattgatttagaaagctgctctcaaaaagggattgtagtgatgaatatccctaccgctaacacgattgccgctgtggaattgaccatggcgcatttgatcaatgcagtgcgttcgttcccttgtgcaaacgatcaaatcaaacaccaaaggttatggaaaagagaagattggtatggcacggaattgaaaaataaaaagctgggcatcattggttttgggaatattggctctagggtgggcattagagcaaaagcctttgaaatggaagttctagcctatgatccttatatcccttcttcaaaagccactgatttaggagtcatttacacgaaaaattttgaagacattttgcaatgcgatatgatcactatccacacccctaaaaataaagaaacgattaacatgataggtgctaaagagattgagcgcatgaaaaaaggggttattttgctcaattgcgctaggggtgggctttataatgaagacgctctttatgaggctttagaaaccaaaaaagtgcgttggcttggcattgatgtcttttctaaagagcctggcattcacaacaagcttttagacttgcccaatgtttatgcgaccccccatattggcgcaaacactttagaatcccaagaagaaatttccaaacaagccgctcaaggggttatggaatctttaaggggttcaagccacccgcatgctttgaatttacccatgcaagcttttgacgcgagcgcaaaagcctacttgaatttagcgcaaaaattgggttatttttccagtcaaatccataagggcgtgtgccaaaaaattgagctcagtctttgtggggagatcaaccaatttaaagacgctcttgtagcctttatgttagtgggggtgttaaaacctgttgtaggggataaaatcaattacattaacgccccctttgtggccaaagaaagaggtattgagattaaggttagccttaaagaaagcgcttcgccctataagaacatgctctctttaaccctcaatgcggctaatggcacaatcagcgtgagcggcacggtgtttgaagaagatattttaaaactcactgagattgatgggtttcatattgatatagagccaaagggtaaaatgcttttattcaggaatacggatattccaggcgttattgggagtgtggggaatgcgttcgctaggcatggcattaacatcgctgattttcgtttggggcgtaacacgcaaaaagaagccctagcactcattattgtagatgaagaagtttctttggaagttttagaagagcttaaaaacattcctgcgtgcttaagcgttcattatgtggttatttaaggtagttggatgcgagattttttaaaacttttaaaaa

SEQ ID NO: 562 - protein, 524 aa, Helicobacter pylori
MYQVAICDPIHAKGIQILEAQKDIVLHDYSKCPKKELLEKLTPMDALITRSMTPITSDFLKPLTHLKSIVRAGVGVDNIDLESCSQKGIVVMNIPTANTIAAVELTMAHLINAVRSFPCANDQIKHQRLWKREDWYGTELKNKKLGIIGFGNIGSRVGIRAKAFEMEVLAYDPYIPSSKATDLGVIYTKNFEDILQCDMITIHTPKNKETINMIGAKEIERMKKGVILLNCARGGLYNEDALYEALETKKVRWLGIDVFSKEPGIHNKLLDLPNVYATPHIGANTLESQEEISKQAAQGVMESLRGSSHPHALNLPMQAFDASAKAYLNLAQKLGYFSSQIHKGVCQKIELSLCGEINQFKDALVAFMLVGVLKPVVGDKINYINAPFVAKERGIEIKVSLKESASPYKNMLSLTLNAANGTISVSGTVFEEDILKLTEIDGFHIDIEPKGKMLLFRNTDIPGVIGSVGNAFARHGINIADFRLGRNTQKEALALIIVDEEVSLEVLEELKNIPACLSVHYVVI

SEQ ID NO: 563 - DNA, 1748 bp, Helicobacter pylori
  CDS (34)...(1701)
ggattttatatttattttatagtaaggcagtcaatgagcaagatagcagatgatcagaactttaatgacgaggaggaaaacttcgcaaaactctttaaaaaagaattagaaaaagaagaaaccctagaaaaaggcactatcaaagaagggctagtcgtttccatcaatgagaatgatggttatgccatggtgagcgtgggcggtaagacagaaggccgtttggctttgaatgagatcaccgatgaaaaggggcagttgctgtatcaaaaaaatgaccccattatcgtgcatgtgtccgaaaaaggtgaacaccctagcgtttcctacaaaaaggccatttcccaacaaaagattcaagctaaaattgaagaattaggcgaaaactatgaaaacgccattattgaaggcaagattgtaggcaagaataaagggggttatatcgtggagtctcaaggcgtggagtatttcctctcccgctcgcactcttctttaaagaatgacgcaaaccatatcggcaaacgcgttaaagcgtgcatcattcgtgtggataaggaaaaccattctatcaatatttctcgcaaacgattctttgaagtcaatgacaaacgacaacttgaggtttctaaggaattgttagaagccacagagccggtgttaggggttgtgcgccagatcaccccttttggcatttttgtagaagctaaggggattgagggcttggtccattattctgaaatcagccataagggaccagtcaatcctgaaaaatactacaaagagggcgatgaagtctatgtcaaagccatcgcttatgatgcagaaaaaagacgcctttcactctccataaaagcgactatagaagacccatgggaagagattcaagacaagctaaaacccggatacgccattaaggtagtggtgagcaacattgaacattatggggtgtttgtggatattggtaatgatattgaaggctttttgcatgtttctgaaatctcttgggataaaaatgtcagccaccctaacaattacttgagcgtggggcaagagattgatgtgaaaatcattgacattgatccaaaaaatcgccgcttaagggtttctttaaagcaactcactaacaggccttttgatgtttttgaatctaaacaccaagtgggggatgttttagaaggcaaagtggcgactttaacggattttggggcgtttttaaatctgggtggggtggatggtttgctccacaatcacgacgctttttgggataaagataaaaaatgcaaagaccactataaaattggcgatgtgatcaaagtgaaaatccttaaaatcaacaaaaaagataaaaagatttctttgagcgcgaagcacttggtgacttcccctacagaagaattcgctcaaaagcataaaacagacagcgtgattcaaggcaaagtggtgagtattaaggattttggcgttttcattaatgctgatggcattgatgtgctgatcaaaaatgaagatttgaaccccttgaaaaaagatgaaattaaaataggccaagaaatcacatgcgtggtggttgcgattgaaaaatctaacaacaaggtgcgtgcttctgtgcataggttagagcgcaaaaaagaaaaagaagaattgcaagcttttaacacgagcgatgataaaatgactttaggggatattcttaaagaaaaactctaaagagtgattttaaaagcatgagaatggcatgagatttaagggtg

SEQ ID NO: 564 - protein, 556 aa, Helicobacter pylori
MSKIADDQNFNDEEENFAKLFKKELEKEETLEKGTIKEGLVVSINENDGYAMVSVGGKTEGRLALNEITDEKGQLLYQKNDPIIVHVSEKGEHPSVSYKKAISQQKIQAKIEELGENYENAIIEGKIVGKNKGGYIVESQGVEYFLSRSHSSLKNDANHIGKRVKACIIRVDKENHSINISRKRFFEVNDKRQLEVSKELLEATEPVLGVVRQITPFGIFVEAKGIEGLVHYSEISHKGPVNPEKYYKEGDEVYVKAIAYDAEKRRLSLSIKATIEDPWEEIQDKLKPGYAIKVVVSNIEHYGVFVDIGNDIEGFLHVSEISWDKNVSHPNNYLSVGQEIDVKIIDIDPKNRRLRVSLKQLTNRPFDVFESKHQVGDVLEGKVATLTDFGAFLNLGGVDGLLHNHDAFWDKDKKCKDHYKIGDVIKVKILKINKKDKKISLSAKHLVTSPTEEFAQKHKTDSVIQGKVVSIKDFGVFINADGIDVLIKNEDLNPLKKDEIKIGQEITCVVVAIEKSNNKVRASVHRLERKKEKEELQAFNTSDDKMTLGDILKEKL

SEQ ID NO: 565 - DNA, 1636 bp, Helicobacter pylori
  CDS (43)...(1584)
aatttggggtgttttaacagaatgcaagcttgaaggagaatcatgtccatttcacgcagaagtatcctaacaaaaatcccaatcgcgctcgctagcgctaatgttttgaaagctgttggtgtttttgaaaaagtagaatccattccgcatgcaacgcattttggcccctttatcgcaaaggttcaaaatggagtgattaaagatattgtcccccaaaaaagcgattataaccctactatgatgttaaaagcgatggttgatagggtgtattcagatagtagggtgaagtatccttgcgtgcgcaagagcttcttagaaaacaaaaaaaaccacaaagaattgcgcgggagagaagagtttgtgcgtgtgagttgggatgtggcgttggatttagcggctaaaaagcttaaagaaatccctaaagaaaacatttataatgccagttatggtggctgggggcatgcgggcagcttgcatcgttgccatcatttagcatggcgtttttttaacacgactttaggaggggctattggcactgatggggaatatagtaatggcgcggccgcaagaataaaccctatgattgtaggggatatggaagtttattcgcaacaaaccacgcatgaagagatgattaaaaattgtaaggtgtatgtcatgtggggggcggatttactcaagtgcaaccgcattgattattttgtgccaaaccatgtcaatgacagctactaccccaagtataaaagagctggtattaaattcattagtatcgatcccatttataccgaaaccgctcaagcctttagtgctgaatggatacccattcgccctaacactgatgtagcgttaatgctaggcatgatgcattatctttatacgagcaatcaatatgataaagcgtttatcgctaaatacactgatggttttgataaatttttaccctatttgctaggagagagcgataatgcgcctaagactttagaatgggcgtctcaaatcactggagtgagcgcagaaaaaatcaaagaattagcggatttgtttgtttctaaacgcacttttttagcgggtaattgggccatgcaaagagctcagtatggcgagcaaccggattgggcgttaattgttttagctagcatgattggtcaagtgggcttatcgggtgggggctttggcttttctatgcattatggagggaacgctcaagcaagctcaggggcaagaattgttcctatgatttcacaagggcataattctgtaaaaagcgttattccagcatctagggtttctgaagcgattttaaatccggataaagaaattgattttatgggcaaaaaactcaaattgcctaaaatcaaaatgatttataattgtggggcggatttattagggcatgaaactgatacaaacgagctgattcgcgctttaaggaccttagattgcgtgatcgtgcatgagccttggtggcgcctacggcaaaatttgctgatattgtctttgcttccactagcactgtggaaagagatgatattgcttttggagggagttattctaagaatgtggtttatgccatgcgtaaggtggtagagcctgtttatgaatctaaagacgattatgagattttcagacagcttgc

SEQ ID NO: 566 - protein, 514 aa, Helicobacter pylori
MSISRRSILTKIPIALASANVLKAVGVFEKVESIPHATHFGPFIAKVQNGVIKDIVPQKSDYNPTMMLKAMVDRVYSDSRVKYPCVRKSFLENKKNHKELRGREEFVRVSWDVALDLAAKKLKEIPKENIYNASYGGWGHAGSLHRCHHLAWRFFNTTLGGAIGTDGEYSNGAAARINPMIVGDMEVYSQQTTHEEMIKNCKVYVMWGADLLKCNRIDYFVPNHVNDSYYPKYKRAGIKFISIDPIYTETAQAFSAEWIPIRPNTDVALMLGMMHYLYTSNQYDKAFIAKYTDGFDKFLPYLLGESDNAPKTLEWASQITGVSAEKIKELADLFVSKRTFLAGNWAMQRAQYGEQPDWALIVLASMIGQVGLSGGGFGFSMHYGGNAQASSGARIVPMISQGHNSVKSVIPASRVSEAILNPDKEIDFMGKKLKLPKIKMIYNCGADLLGHETDTNELIRALRTLDCVIVHEPWWRLRQNLLILSLLPLALWKEMILLLEGVILRMWFMPCVRW

SEQ ID NO: 567 - DNA, 540 bp, Helicobacter pylori
  CDS (24)...(509)
attgacgcttataaggataaaagatgaatatttttcaaacgagtttgaaatgttgcgtggggttggttttgtctgtgggggtcttattaggggattctaaagcttttaaggttagggtggataaaagtttaaccccgccttttttgaatgtgctttcattagcttttaaacaagacatgaaaaaagaggtcatttttgtgattaccaaaagcaataagttgagtaaaaaagtgctttgtgattttgacgcttttttattgcctgagactctgatgagcggcatgcctaaaaaagcactattccataaagagtttttattccaatctaaagaaaataaaacgctctatgcgttttcgctgattgattctcaatattgctcaaaaggtggaaattacagatacgaactagaaaaattagaacgctggtttgtgcaaaaagcacctgagttggctgaaagctatagggtgaattacaaaaatcaatacaataaaacacagatctcacaaaaataaagaatgagcgatgattttagtattagat

SEQ ID NO: 568 - protein, 162 aa, Helicobacter pylori
MNIFQTSLKCCVGLVLSVGVLLGDSKAFKVRVDKSLTPPFLNVLSLAFKQDMKKEVIFVITKSNKLSKKVLCDFDAFLLPETLMSGMPKKALFHKEFLFQSKENKTLYAFSLIDSQYCSKGGNYRYELEKLERWFVQKAPELAESYRVNYKNQYNKTQISQK

SEQ ID NO: 569 - DNA, 1572 bp, Helicobacter pylori
  CDS (25)...(1548)
tctcacaaaaataaagaatgagcgatgattttagtattagattttgggagtcaatacacacagctgattgctagaagattgagagagagagggatttatacagaaatagtccctttttttgaaagcatagaaaacattcaaaaaaaagcccccaaaggtttgattttgagtggggggccagcgagcgtgtatgctaaagacgcttacaagcctagtgggaaaatctttgatttgaatgtgccgattttagggatttgctacggcatgcagtatttggtggatttttttgggggggtagtggttggtgcgaatgagcaagaatttggtaaggctgttttagaaatcactcaaaattctgtgatttttgaaggcgtgaagattaaaagccttgtgtggatgagccatatggataaagtcatagaactgcctaaaggctttactacccttgcaaaaagccctaattccccccattgcgcgattgaaaacggcaagatttttggcttgcaattccacccagaagtcgttcaaagcgaagaagggggtaagattttagaaaattttgcccttttagtttgcggctgtgaaaaaacttgggggatgcagcatttcgctcaaagagaaatcgcacgattgaaagaaaaaatcgctaacgctaaggttttgtgcgcggtgagtgggggcgtggattctacggtggtcgctacgctgttgcacagagccattaaggataatttgatcgctgtttttgtggatcatggcttgttgcgtaaaaatgaaaaagaaagggtgcaagcgatgtttaaggacttgaaaatccctttaaacacgatagacgctaaagaagtctttttgtctaaattaaagggcgtgagcgagcctgaattgaagcgaaaaatcatcggcgagacctttattgaagtgtttgaaaaagaagccaaaaagcaccatttaaaaggcaaaattgaatttttagcccaaggcactttataccctgatgtgattgaatccgtgagcgttaaagggccttcaaaagtgatcaaaacccatcataatgtgggcggactgcctgaatggatggattttaaactcatagagcctttaagggagttgtttaaagatgaggtgcgcttactgggtaaagaattgggcgttagtcaggattttttaatgcgccacccttttccagggcctgggcttgctgtaaggattttaggcgaaatcagtgagagtaagatcaaacgcttgcaagaagcggattttatttttatagaggaacttaaaaaagccaatttgtatgacaaggtttggcaagctttttgcgtgctgttgaatgtcaattctgtgggggttatgggggataaccgcacttatgaaaacgctatttgcttaagagcggtaaatgcgagcgatggcatgacggcgagcttttcatttttagagcattcttttttagaaaaggtttctaaccgtatcactaatgaagtgagcggtatcaatagggtggtgtatgacattacctctaaaccaccaggaacgattgaatgggaatgattatcttaaaaaatagcacta

SEQ ID NO: 570 - protein, 508 aa, Helicobacter pylori
MILVLDFGSQYTQLIARRLRERGIYTEIVPFFESIENIQKKAPKGLILSGGPASVYAKDAYKPSGKIFDLNVPILGICYGMQYLVDFFGGVVVGANEQEFGKAVLEITQNSVIFEGVKIKSLVWMSHMDKVIELPKGFTTLAKSPNSPHCAIENGKIFGLQFHPEVVQSEEGGKILENFALLVCGCEKTWGMQHFAQREIARLKEKIANAKVLCAVSGGVDSTVVATLLHRAIKDNLIAVFVDHGLLRKNEKERVQAMFKDLKIPLNTIDAKEVFLSKLKGVSEPELKRKIIGETFIEVFEKEAKKHHLKGKIEFLAQGTLYPDVIESVSVKGPSKVIKTHHNVGGLPEWMDFKLIEPLRELFKDEVRLLGKELGVSQDFLMRHPFPGPGLAVRILGEISESKIKRLQEADFIFIEELKKANLYDKVWQAFCVLLNVNSVGVMGDNRTYENAICLRAVNASDGMTASFSFLEHSFLEKVSNRITNEVSGINRVVYDITSKPPGTIEWE

SEQ ID NO: 571 - DNA, 834 bp, Helicobacter pylori
  CDS (26)...(808)
aaaaacccccacgctatggtaaatcatgctcatttgtaacgataaatccaatccaaaaacccttttagaagaaatcatggcgttaaggccatggcgtaaaggcccttttgaaatttctcaaatcaagattgatagcgaatgggatagctccattaaatgggatctagttaaaaacgccactcctttaaaagataaggttgtggctgatgtgggttgcaataacggctattacttgtttaaaatgctagaacatgggcctaaaagtttggtggggtttgatccgggcgttttagtcaaaaaacaatttgaatttttagcccccttttttgataaagaaaaaaaaatcatttatgagtctttgggggtagaggatttgcatgaaaaataccctaacgcttttgatgtcattttttgcttaggggtgctataccacagaaaaagcccgctagaggctttaaaagccttgtatcacgctttgaaaataaaaggggagctggtgttggataccttaatcattgattcgcccttagacatcgccctttgccctaaaaaaacttatgctaaaatgaaaaatgtttattttatccccagtgttagcgcgttaaaagggtggtgcgaaagggtagggtttgaaaattttgagattcttagcgttttaaagaccacgcctaaagaacagcgtaaaacggattttattttggggcagagtttggaagattttttggataaaacagatccctctaaaactttagaggggtatgacgcccctttaagggggtattttaaaatgcttaaaccaagcaagcgttaaataaaggattaagatagtgcaag

SEQ ID NO: 572 - protein, 261 aa, Helicobacter pylori
MLICNDKSNPKTLLEEIMALRPWRKGPFEISQIKIDSEWDSSIKWDLVKNATPLKDKVVADVGCNNGYYLFKMLEHGPKSLVGFDPGVLVKKQFEFLAPFFDKEKKIIYESLGVEDLHEKYPNAFDVIFCLGVLYHRKSPLEALKALYHALKIKGELVLDTLIIDSPLDIALCPKKTYAKMKNVYFIPSVSALKGWCERVGFENFEILSVLKTTPKEQRKTDFILGQSLEDFLDKTDPSKTLEGYDAPLRGYFKMLKPSKR

SEQ ID NO: 573 - DNA, 1224 bp, Helicobacter pylori
  CDS (31)...(1197)
ttaaattcaattttaaagaagagtagttaaatggttattgttttagtcgtggatagttttaaagacaccagtaatggcacttctatgacagcgtttcgtttttttgaagcgctgaaaaaaagagggcatgtgatgagagtggtcgcccctcatgtggataatttagggagtgaagaagaggggtattacaaccttaaagagcgctacatccccctagttacagaaatttcacacaaacaacacatcctttttgctaaacccgatgaaaaaatcttaagaaaggcttttaagggagcggatatgatccatacttatttgccttttttgctagaaaaaacagccgtaaaaatcgcgcgagaaatgcaagtgccttatattggctctttccatttacagccagagcatatttcttataacatgaaattggggtggttttcttggttcaacatgatgcttttttcgtggtttaaatcttcgcattaccgctatatccaccatatccattgcccgtcaaaattcattgtagaagaattagaaaaatacaactatggagggaaaaaatacgctatttctaacggctttgatcccatgtttagatttgaacacccgcaaaaaagcctttttgacaccacaccctttaaaatcgctatggtaggacgctattctaatgaaaaaaatcaaagcgttttaatcaaagcggttgctttaagcaaatacaaacaagatattgtattattgctcaaaggcaaagggcctgatgagaaaaaaatcaaacttttagcccaaaaactaggcgtaaaagcggagtttgggtttgtcaattccaatgaattgttagagatcttaaaaacttgcaccctttatgtgcatgcagccaatgtggaaagcgaagcgattgcgtgcttagaggccattagcgtggggattgtgcctgttatcgctaatagccctttaagcgcgaccaggcaatttgcgctagatgaacgatcgctatttgaacctaataacgctaaagatttgagcgctaaaatagattggtggttagaaaacaagcttgaaagagaaaggatgcaaaacgaatacgctaaaagcgctttaaattacactttagaaaattcagtcattcaaattgaaaaagtttatgaagaagcgatcagagattttaaaaataacccccatctctttaaaaccttatcataatgaaaggataaaaaatgcaagaag

SEQ ID NO: 574 - protein, 389 aa, Helicobacter pylori
MVIVLVVDSFKDTSNGTSMTAFRFFEALKKRGHVMRVVAPHVDNLGSEEEGYYNLKERYIPLVTEISHKQHILFAKPDEKILRKAFKGADMIHTYLPFLLEKTAVKIAREMQVPYIGSFHLQPEHISYNMKLGWFSWFNMMLFSWFKSSHYRYIHHIHCPSKFIVEELEKYNYGGKKYAISNGFDPMFRFEHPQKSLFDTTPFKIAMVGRYSNEKNQSVLIKAVALSKYKQDIVLLLKGKGPDEKKIKLLAQKLGVKAEFGFVNSNELLEILKTCTLYVHAANVESEAIACLEAISVGIVPVIANSPLSATRQFALDERSLFEPNNAKDLSAKIDWWLENKLERERMQNEYAKSALNYTLENSVIQIEKVYEEAIRDFKNNPHLFKTLS

SEQ ID NO: 575 - DNA, 947 bp, Helicobacter pylori
  CDS (16)...(903)
tagaaaaggtagtttatggagttagaagaaattgttgatagtgagaggaatatccataagactatagaagttttaggaaaaggcggacagggtatagtgtatcgctgtttggataaggatgtggctattaaggtagtattgagggatggagattttattaaagacaaagaatccctcaaacaatatgaaaaaagcgttctaaacttatcttttaagccgatagagagtcatttccctatgtcaattccactggtaactttgaaagaaaaacaaggctatgtgatgaaaatggctgagggctatgaaccactaaaaacttttttaaagaagcccagcattttagaaaacgaagaaaaagatgggatttttaggatcaataatgccattcaagaactttgcaaagataaccattatatgactttaagtttaagttattactcacaaacacaaggattgagatcacgattaaaaatactcacccatttagcaaaacttctattcagattgcaaagtaagggtttggtgtatggggacttgaatttaaacaatgttttttataaagacaattcagcgtttttaattgatgcggataatgtgcgttatgagagcgaaaaagccctgtgtgttatttttacgcctaactatggggctttagagattagccaaacctctaaaaatagcgatacaaccaattacaacaccatgcttagcgataccttttcttttgctatcataacttatgaacttttaaatatggttcatccttttgatgggaataaggcagatgatagtgtagaaaattttatagaattgccttggattgaagatagaaaggatgatagcaatcgttcttgtggcttactgccttttttcttaacaagggatttaaaaaatttattagcgtaatgctttgaagaaggcaaaaaagatcctttgaaacgccctac

SEQ ID NO: 576 - protein, 296 aa, Helicobacter pylori
MELEEIVDSERNIHKTIEVLGKGGQGIVYRCLDKDVAIKVVLRDGDFIKDKESLKQYEKSVLNLSFKPIESHFPMSIPLVTLKEKQGYVMKMAEGYEPLKTFLKKPSILENEEKDGIFRINNAIQELCKDNHYMTLSLSYYSQTQGLRSRLKILTHLAKLLFRLQSKGLVYGDLNLNNVFYKDNSAFLIDADNVRYESEKALCVIFTPNYGALEISQTSKNSDTTNYNTMLSDTFSFAIITYELLNMVHPFDGNKADDSVENFIELPWIEDRKDDSNRSCGLLPFFLTRDLKNLLA

SEQ ID NO: 577 - DNA, 509 bp, Helicobacter pylori
  CDS (44)...(469)
atgctttgaagaaggcaaaaaagatcctttgaaacgccctactatgcccttatttatagagagcttagaaaaagctagcttgcaagtgttagaatgtgaaaattgttcaatgacttattatgatagagattataatagagaatgtgagatttgcccttattgcgatgctaaaaaacctgtcagacttgtagcaacaagttattaccaaaagagcgaagttttttattttgtctcgaattttacagaccctatttttttaccgacaaccttatttaaggggattgaagtggttaaaagcgaatgggagtttgcagagattgctaataatatattgatttttcatcatgacatacaacaagaaaagattctcattaataataaaagattggatcactataggatagaaatagatttagaaaaagaattgactatttcatacaatggttttttaattaaggttcaaaaatgctgagttttatcaaagaagatagcatcatcaaggcttataa

SEQ ID NO: 578 - protein, 142 aa, Helicobacter pylori
MPLFIESLEKASLQVLECENCSMTYYDRDYNRECEICPYCDAKKPVRLVATSYYQKSEVFYFVSNFTDPIFLPTTLFKGIEVVKSEWEFAEIANNILIFHHDIQQEKILINNKRLDHYRIEIDLEKELTISYNGFLIKVQKC

SEQ ID NO: 579 - DNA, 1260 bp, Helicobacter pylori
  CDS (27)...(1193)
aatggttttttaattaaggttcaaaaatgctgagttttatcaaagaagatagcatcatcaaggcttataacctcaataccgcaaaactagagccaaaagatagagaaaaattgggattattaaagattgaaaaaaataaaatatattttcatctagatgaaaagcgttatttgaaattagagatcataggcaaaaccaaagaaaaagaaattaaaaacgctttttgcagtaatgcttttcttgcagctcaagtcctaaatttaaaccaagaaagacaagttttagaattgaagtgccatttcttcaagcaccctataaaaattcttcctgaaccattaaacattaatttcaaagacacaatcataaaaaagttactaaaagatatgggcaaagataaaaaaatagaagattttaaagaaacttgtattttaaaaatagctggttttacttattttgtgtgcgtattgccttatgaatatgagaataaagaggataaagagaatagtgaagagattttaaaagaagatttcaggctgttaaataccaaggggggattaagcgttaagcgtgctttgataaataacaggcattcttatgaagcgataaaattaagacccattaaacaagagttagtgcctggtttgtgtttgttttttcaaggttcattagaatttaatgataaaaccacaaaaaccatgcgaacgagccttttagaccagatccagcaagatgacaaatcttatttaaaaatttgggaaaaatatctcatcaaaagcgctcaaaaaagttttaatgaggcaaaagaagtgggggttttagagattgaaagcgtgagtaaagaaggagggaatttaagaattcgttttaagccagctttaggcaagaataaaatggaaatcttaaagaaatcacaatttaaaaaggggagtgatttaggggttttagaggatttagacccacaaaatgaagaaaatttaatcaatcttatttctgaacaaaagaaacaaatttctaaaaacaacagccaatcaataatgattgaagacattagtggggatgattttattatagattacgatctttccataaaagagggcgatgcttttcatttaaattatatgggggatctaaatacgcttaaaaaacaatatagcgcattagataagacaaagaaaggtttgaagcgccaatcctaatttaggattaattttaaacattaaagaggataaagagaatagtgatagcgataatgatactgca

SEQ ID NO: 580 - protein, 389 aa, Helicobacter pylori
MLSFIKEDSIIKAYNLNTAKLEPKDREKLGLLKIEKNKIYFHLDEKRYLKLEIIGKTKEKEIKNAFCSNAFLAAQVLNLNQERQVLELKCHFFKHPIKILPEPLNINFKDTIIKKLLKDMGKDKKIEDFKETCILKIAGFTYFVCVLPYEYENKEDKENSEEILKEDFRLLNTKGGLSVKRALINNRHSYEAIKLRPIKQELVPGLCLFFQGSLEFNDKTTKTMRTSLLDQIQQDDKSYLKIWEKYLIKSAQKSFNEAKEVGVLEIESVSKEGGNLRIRFKPALGKNKMEILKKSQFKKGSDLGVLEDLDPQNEENLINLISEQKKQISKNNSQSIMIEDISGDDFIIDYDLSIKEGDAFHLNYMGDLNTLKKQYSALDKTKKGLKRQS

SEQ ID NO: 581 - DNA, 1185 bp, Helicobacter pylori
  CDS (16)...(1113)
tccataggctagttgatgtcaaaaagaagcgaagttttagaacaatttcatggcggtttaaaaaatttagaattacaaactaaaagacgcatgggtttgtggggcgatccaaaagagaatgaagaacaaactttgtttttagaagaaattgaaaatgaattaaagcaattagaaaacaaagaaaatcttaaagcagacaacaacacagaatttaaagaagaaaatcaagacactaaagaaaaccagcctaacgatttgttttctttgccattgcccactcaaaccaccatcaatggaattaaagaatttgtagaagagcctgtgatagaaacagagaaaaaagaaacatcccaaaatgagccaatccaagaaaaaaaagaaagaatttttaaaaactttttctccagaataggctttgataaaagtattgcccctacaatgctttttgaagaagtgagagatgcaagcgttatctatcatttagagaaaaaattaggcgattatatcttttatgtagcgtgtttcttctttggcacaacggcattgcttattatcttactgactattctgttgcccttaaaacaaaaagagccgtatttagtgcaattttctaacaataaagaaaattttgctttagttcaaaaggcagatagcagcattacagccaataaagctcttattcgttcattagtgggagcgtatgtgctaaacagggaaagcattactcatattgagcaacatgaaaaaatgcgtcaaaacaccattaaagagcaaagttccaatgaagtatggtatgaatttgaaaaactcatcgctcattatgacagcatttacactaatcctttactcacaagaaaagtaaagattgcaaatatttacttagataaagatttagcctatattgacattgaagtgagcttgtatcatagtggagaattagagagcttgaagcgctataaagtggtgatgagttttgaatttaaaaaacaagaaatcaattttgactccatgtctttaaatcctacaggctttatggttacaagttatgatgtaactgaaattgcgattgtgaattacccaaccgctaaagcgattgggctttttcttgcttcatagctccataactagctagatccaatatgtttccatatttagaactaaccccgttagaggaagctccacaag

SEQ ID NO: 582 - protein, 366 aa, Helicobacter pylori
MSKRSEVLEQFHGGLKNLELQTKRRMGLWGDPKENEEQTLFLEEIENELKQLENKENLKADNNTEFKEENQDTKENQPNDLFSLPLPTQTTINGIKEFVEEPVIETEKKETSQNEPIQEKKERIFKNFFSRIGFDKSIAPTMLFEEVRDASVIYHLEKKLGDYIFYVACFFFGTTALLIILLTILLPLKQKEPYLVQFSNNKENFALVQKADSSITANKALIRSLVGAYVLNRESITHIEQHEKMRQNTIKEQSSNEVWYEFEKLIAHYDSIYTNPLLTRKVKIANIYLDKDLAYIDIEVSLYHSGELESLKRYKVVMSFEFKKQEINFDSMSLNPTGFMVTSYDVTEIAIVNYPTAKAIGLFLAS

SEQ ID NO: 583 - DNA, 745 bp, Helicobacter pylori
  CDS (37)...(717)
taaggggggatttggaaggtgttggaattgaaattaatgggacagaagaggatgaataaatcaaacaaattagtcattatcaatcgcgccattccaggtgggggcaagacctctttgatcaaacagattgaagagttggcaaaaagcttggggcattctattagcgttcattctaccgatgaatatttcatccaaacagatgaagagggtatcaggcattatgttgttgataaaaagaaactcaatgaataccaccaaaacaatcaagaagccttcaaacaagctttagaaaatcgtatagatattgtagtgtgcgataacaccaattttgaatcgtggcaaagcaaaccatatacagatatggctagagaatttggctataaaattttgttgattgattttaagaatagacacttagaaacccccatggattatggatgggatgttgcgcaatgcatcaagaagccacgaggtattgcaaagcattatgactatgatttttatttggagagggttttggttgagccacaggattatgagaaacaaaatagagagttgagcttaaaagccttagaatttttgaaatacaattttgattttgatgtgattttttattcttttggggagcaattaatgcctattcttactagaatgttagtttctgtctctaagtctcatagaaagagacttgaaaactatggcaaagacattaaaacctaatttagataaagatgagttaaacaca

SEQ ID NO: 584 - protein, 227 aa, Helicobacter pylori
MGQKRMNKSNKLVIINRAIPGGGKTSLIKQIEELAKSLGHSISVHSTDEYFIQTDEEGIRHYVVDKKKLNEYHQNNQEAFKQALENRIDIVVCDNTNFESWQSKPYTDMAREFGYKILLIDFKNRHLETPMDYGWDVAQCIKKPRGIAKHYDYDFYLERVLVEPQDYEKQNRELSLKALEFLKYNFDFDVIFYSFGEQLMPILTRMLVSVSKSHRKRLENYGKDIKT

SEQ ID NO: 585 - DNA, 531 bp, Helicobacter pylori
  CDS (19)...(468)
atttactaaaggaaaacaatgattaaactaatcttacacaagaagtccatacaaattgatgaaacattgctgaatgtaaaagagcatttagaaaagttttattcaaataaagaacaagagacaatcgctcaaactttagagaatgaaacagaaatttcttgtagctatttttgggacaaagacttcttgttgttagagcaacttttagaaaatratttaggtcattttacctttgagagcgagtttgccctactaaaagataaagagactttaaacctatctcaaatcaaacaaatcggtgtcttaaaggttcttacctatgaratgatacaaaccttaaaaaatcaaatcattcatttagcacaagttgtcaatgaagaaaatttagaaaaagatgaagaacttgttgtctaccacctaaatttcacgtcacgcaacaatcttacaaaatattatccaagttctgtgtgattaaaaaagaaagaaatatcgcatgaaaaaattaagtcattttagaaagcttatcgcctt

SEQ ID NO: 586 - protein, 150 aa, Helicobacter pylori
  VARIANT 66, 102: Xaa = Any Amino Acid
MIKLILHKKSIQIDETLLNVKEHLEKFYSNKEQETIAQTLENETEISCSYFWDKDFLLLEQLLENXLGHFTFESEFALLKDKETLNLSQIKQIGVLKVLTYXMIQTLKNQIIHLAQVVNEENLEKDEELVVYHLNFTSRNNLTKYYPSSV

SEQ ID NO: 587 - DNA, 334 bp, Helicobacter pylori
  CDS (34)...(294)
ctggtttatgagtattttttaaaagaagtccccatgcaattagttggtatttcagtttctaatctcaaagaaatcagctccaaagaaaaatttctttggctcaatgctaagagttttttactctcaggatttgtgccttttattatgataccttggctagatatattgaactcttttgtgctttatgtgtgctttctcttaatttttagcatagcggagttctttgatgaagatataagtgacattttaatcgctcattccaaaattaaaaccaaagctaattcattttacgcttaaaaggaaaaaatatgcaaaaagaagtcttagtagaaaa

SEQ ID NO: 588 - protein, 87 aa, Helicobacter pylori
MQLVGISVSNLKEISSKEKFLWLNAKSFLLSGFVPFIMIPWLDILNSFVLYVCFLLIFSIAEFFDEDISDILIAHSKIKTKANSFYA

SEQ ID NO: 589 - DNA, 995 bp, Helicobacter pylori
  CDS (37)...(948)
taaaaacacccctaaaagaaaaagaaagtcttcttaatgttagaaagcgcccttaaatattgcaaggaaaaagccatagaccttttagtagggtttgtgccaaaaacctattctatggcacaagagtgcaatattttaggcttgtatgatgatgctttcattattaccaaacaagaaaatctagtaggcattatatccttacaaggactaagctattctaatttaatgcaaaaagacttagagggctattttgatgctagacaaaatgttctcaacaccattagtaaagacattcaattaagaattgtggctaaaaggcgtaaggaatttatcaatcaaagtccaaatattgacaatatttatgccaaagctattatcacacaatttgaaagcaagggaatctataaaacagagtattttttagtgtttgaaactatcacttctaatgtcaagtctttctttgaaaaaaagaaattggaaatgactacttcaattaatgaagagttagaagaaagctctaaagaagataaacaagagaatgaaaatmgctccaatgaaactcattcaaacacaagctctaaaaaagacaagaaaaacaagttcaaaaaaaagataacctttagcaccaaaagtaaaagagccttactcattcaaaccatagaaagagtaaaaaacgctcttaaagaatttaaacccactttactaaattctaaagaagtattaaatttctacgcagaatacatcaatggcaaatacatcgcctttaatcctaaattaaagcgattaagcgatactatattgcatctaatgtgcattttaagaaagattactttgtcattgaatttcaaaatcaaaacaccttttgtgcgtgtgtggggattaaggcttatgagagcgaagaaatttcttcgctccctatatctactcttttacacacccaaattgaactagatttaatctttcatatccgctctttagggcaatttgaaagcctg

SEQ ID NO: 590 - protein, 304 aa, Helicobacter pylori
  VARIANT 171: Xaa = Any Amino Acid
MLESALKYCKEKAIDLLVGFVPKTYSMAQECNILGLYDDAFIITKQENLVGIISLQGLSYSNLMQKDLEGYFDARQNVLNTISKDIQLRIVAKRRKEFINQSPNIDNIYAKAIITQFESKGIYKTEYFLVFETITSNVKSFFEKKKLEMTTSINEELEESSKEDKQENENXSNETHSNTSSKKDKKNKFKKKITFSTKSKRALLIQTIERVKNALKEFKPTLLNSKEVLNFYAEYINGKYIAFNPKLKRLSDTILHLMCILRKITLSLNFKIKTPFVRVWGLRLMRAKKFLRSLYLLFYTPKLN

SEQ ID NO: 591 - DNA, 1598 bp, Helicobacter pylori
  CDS (39)...(1556)
ataattatatagaattagtgcaagccaatcgtttgagcatgcaagagtgtgctttaaacttagttataagggctaaaagtaaagctaaattagacaagtctttaaaagagattttatccttgcttaataatgctggactaggcagtgttacagaaactatagggctaaaaccatcttatttttcattcttcccaaataacgccaatatcaaccctagaatgagacatcaaacttcccaagtcatagcatctttgattttgtttgagaaaaataatacaggttttagagcaaattcttggggggatatgcccttatctgtgtttaagaacctagaccatagcccttatttgtttaattttcataatcaagaagtcaaacataagggcgtgttagcccacaatgtcgcacgagtagtgggacataccatgattataggagcaacaggtgctggtaaaaccacactcattagctatttgatgatgagtgccttaaaatattctaacattgatattttagctcttgatagactaaatggtttgtattcctttaccaagtattttgatgggatttataatcaaggcgaaaactttcatattaaccctttttcattagaagatagcgcaactaatagagcctttttattgcatttttatgcccaaatggcaaaagtggatagttatgatgaccataaggataaagtagaagatagaacagcccttttaaatgctattgatacgatgtatagaaattataacgatgaagtcaaacaagccaaatttagcaaccaagaattaccccttccttttgatttaaaagagtttgtcaatgccattgctaaaaccaatacagacattttagatagtagttttgaagactatttaaaatcttccttattttctagccgaatggatagtctagattttaaaactcgtattagcaccataaataccgatagcattttacataatgatgatgacgctgggcttttagcctactatgtctttcataagatgattgacagagccttaaaaatcaatcgtgggtttttatgctttattgatgagtttaagtcttacgctcaaaatgaaatgatgaataaaaaaatcaatgaaatcattactcaagctagaaaggctaatggggtgattgttctagccttacaagacattaaccaactaagcgaagtgagaaacgctcaaagctttataaaaaatatggggcaattgattttgtatccccaaagaaatattgataccaaagatttaaacgataaatttggcattagactaagcgatacagaaaaacattttttagaaaacaccgccgttaatgaatacaaagtcttactcaaaaacatgaatgatggctcatctaacattatagatgtgagcctaagttctttgggtaattacctacaaatctttagctctaattctagcatggtagaacacattgataatctcattaagcattaccctaaaacttggcgagaagtctttgtgagtaacaaacacgaaaattttgatgacaaaaaacacttagaaaaggtgcttaaatgaaaaacatcatgcgtttagtttttgtgatagtggctatgt

SEQ ID NO: 592 - protein, 506 aa, Helicobacter pylori
MQECALNLVIRAKSKAKLDKSLKEILSLLNNAGLGSVTETIGLKPSYFSFFPNNANINPRMRHQTSQVIASLILFEKNNTGFRANSWGDMPLSVFKNLDHSPYLFNFHNQEVKHKGVLAHNVARVVGHTMIIGATGAGKTTLISYLMMSALKYSNIDILALDRLNGLYSFTKYFDGIYNQGENFHINPFSLEDSATNRAFLLHFYAQMAKVDSYDDHKDKVEDRTALLNAIDTMYRNYNDEVKQAKFSNQELPLPFDLKEFVNAIAKTNTDILDSSFEDYLKSSLFSSRMDSLDFKTRISTINTDSILHNDDDAGLLAYYVFHKMIDRALKINRGFLCFIDEFKSYAQNEMMNKKINEIITQARKANGVIVLALQDINQLSEVRNAQSFIKNMGQLILYPQRNIDTKDLNDKFGIRLSDTEKHFLENTAVNEYKVLLKNMNDGSSNIIDVSLSSLGNYLQIFSSNSSMVEHIDNLIKHYPKTWREVFVSNKHENFDDKKHLEKVLK

SEQ ID NO: 593 - DNA, 563 bp, Helicobacter pylori
  CDS (24)...(509)
caactcttttttaagggggacacatgtctaatttgcaagaacttagagagcatttaaaagaattagaaaattcctttgaaataggctcttttactaaagaaaatattaaagaatacgctaaatgcttttttatgagtttaagcatgtttttagaagaacaagaaaaaaaccaacaagaagagtttttagaacaagataccaaagaaaatcaagaagagctcattaaaaacattcaaacaagcattgctaaaaaccaagagttagaaaaaatctcttttgaaaaatgggagaataaaattcaagaaagggttttgcctaagttaaaacgcattgttacgcataagttgcaagaaagtatcacatctagcataaacacgcaattagagagttttaaaaaagatgagttagatttatctagcgtgtttgaaatccaaagaaagaacactcaaatagcgtatagattagctataggggggcttataggtatcattgctttaagctcgcaaatttgattattaactctatacttcacgctttttagcctttgtgtgttcttttgtaaa

SEQ ID NO: 594 - protein, 162 aa, Helicobacter pylori
MSNLQELREHLKELENSFEIGSFTKENIKEYAKCFFMSLSMFLEEQEKNQQEEFLEQDTKENQEELIKNIQTSIAKNQELEKISFEKWENKIQERVLPKLKRIVTHKLQESITSSINTQLESFKKDELDLSSVFEIQRKNTQIAYRLAIGGLIGIIALSSQI

SEQ ID NO: 595 - DNA, 3222 bp, Helicobacter pylori
  CDS (22)...(3186)
  misc_feature 642: n = A,T,C or G
ccttaaatctaaggggtgtgcatgccatacaatgaaatcacaagggttcaaatccctgccttaatgcatttagccaagttgggctatgattttatccccactaattctaaagaaaataagcccaacctagacaccgccaccaacattttaaccaatagtttcactaaatcctttgagcggttaaaccccactaaaaacgcacaagaaacgcttgctgaaatgaaaaaacgcttgaattgcgatgatttgggcaaaagcttttatgaatacttgctcaaaagcgagaatcaaatcatagactttgataaccctaacaacaatctttatgaaatgatgactgaattaccctacaaatcttttaggcctgacaccaccctttttatcaatggcttgcctttggtgaatatagaagttaaacagccttacgccaaaaaaggcattaaagaagaaagagatcgccacatcaaacgctatgaaaaccctgaaaacaaagttttttataatctcgcgcaaatctggctttttagcgataacttaccctatgatgaaaacaaacccgatcaaggcgcgttttatagcgcttcttattcgcccattttccaacgctttgttgaagctcataggctagatattwcccccssnccccsccaaaaaaatgatcaaaatcatcaaaacgatcaaaatcatcgatcgcttgaagaaattcaaaaaagcgtcttaaacgaatttaaccttaaagacaccgacaccccaaaaagccctaaagacacccccacaaactcccttttaacttcgttttgctctccaaaaaggctttgctttatcctaaaatacggcatcagtttcttaaaagaaaaatcagagtttaaaaaacacgtttggcgttatgcgcagatgtttgcgagcttgaacgttttaaaagaattgcaaaagcattatggaacaaaccaaaacctaaaagatcccctaaaaggcatcatctggcacacgcaaggcagcggtaaaaccgccttaacctaccacttaaccaaactcatcagagacttttttagccgatccaacctaaacaaaaagactaaattttattttattgtggacaggttggatttattggagcaagccaaaaacgagtttttaaaaagaggcctttgtgtgcatgaggcagaaaataaagaggatttgagccaaaaattaaaaagctctagcgtttttgaaggctctcaagggaatgatgaaatcatcgttgtgaatatccaaaaattcaaagcccccaatgaagaaaaatcccccaatgaagacccctctaatagcgctcctaaagaaatcatttctaaaacagaattacaagaatccattcaaaacagccgcaatttacaaagggtgtttatcatagatgaagcccacaggagctacgatcctaaaggttgcttttacgctaatttgatagaatgcgacaagacagcaattaaaatcgccctcacaggcacgcccctattagaagacaacgcgcaagataaagccactaaaaacacttttggcaactacttgcacacctattcttatacagaatccattaaagacagacacaccctaaaactccagttagaaagcattgaaacgagctataaagaaaaattacaagaaatctatcgccttttacaagaaagcatcactattgaagacacagaagttaaaaaagaaacgatttttaacgatgaaaaatacattaacgccatgctctattatatcattagagatttattggattttaggcgtttgaatgataatgaacgcttaaaggctatggtggtttgtttttctagcaagcaagccagattagctgattgtctttttaatgaagtccaagaaaaagtcttacaagaaaaccccaacctaaggattttaaacaaactcaaatccagcctgattttgcatgatgaacaagaagtcaaagaaaaggttcattctttcaaacatgaagataccgatatagtctttgtgtttaacatgcttttaaccggctttgatttacccagtctcaaacgcctttatatccacagagaattaaaagatcacaatttgctccaagccctagccagagtgaatcgctcctataaaaacatgtcttttggctaccttatagattttgtaggcattcaagaaaattttgacaaaacgactgatgattacttgaaagaattaaaccgattcaatcaaagcggtgccaatagcgattctcatatcaaagacatgtttgcggatcgtaagactttagaagaagacattaaaaacgcctatgatgatctttttgattaccccattgacgatatagagggcatgactagcgccattgtcagcatgagcgcaatgaacgagcttgtaaaagtctcacgcgccattaacacgctcaaagagcgctacaatttaatccgcacttctaatgataaaaaaatcctttcactaaaagaaaaaattgatattgaaaagatccataaaatctcttcaatgcttcatcaaaaagccaaacacctccatgcgttaaagaatatcaatgagcctaaaaacccaaacgatttaatgattttagaagacctcatcgctcttttagactttaaaatagagtttaaagaacgcaaagaattacgctttaaagaacaagaagagattaccaccaaacaaaagcaagctaaagagattttagaaaaaatcccggatcaacaagataaagaaatccaaaagttttacaaagacttttcaaaattactccaaacgcccacaacaagccagaattttgaggaaatttctcattcctatgatgcgatcatttcacaactcaaacaacacaaagaacaaaccacccacttattaaacaaatacgataatgatttgtcttatgcgatcacgaacaaacgccttcataagcaccttatggaacaaaacatttctaactcagcgggaattttcacgcttttaagcgccttaaaaaaagctattgatgcgcgtatttttaagcgtcaagaaatcttaaacgaagagtattacctaaaaaatgccataaaagcagaattaaataacgctttcaaaaaagacccctccttaaaagatttagaaaaagaaaaagaacttatcattcaaaccctttttaacgaactcacacaaaaccaccatcaaggaaatccgcatgcctaataacgctttattgcaaatcaaacaagacaccct

SEQ ID NO: 596 - protein, 1055 aa, Helicobacter pylori
  VARIANT 205, 207, 209: Xaa = Any Amino Acid
MPYNEITRVQIPALMHLAKLGYDFIPTNSKENKPNLDTATNILTNSFTKSFERLNPTKNAQETLAEMKKRLNCDDLGKSFYEYLLKSENQIIDFDNPNNNLYEMMTELPYKSFRPDTTLFINGLPLVNIEVKQPYAKKGIKEERDRHIKRYENPENKVFYNLAQIWLFSDNLPYDENKPDQGAFYSASYSPIFQRFVEAHRLDIXPXPXQKNDQNHQNDQNHRSLEEIQKSVLNEFNLKDTDTPKSPKDTPTNSLLTSFCSPKRLCFILKYGISFLKEKSEFKKHVWRYAQMFASLNVLKELQKHYGTNQNLKDPLKGIIWHTQGSGKTALTYHLTKLIRDFFSRSNLNKKTKFYFIVDRLDLLEQAKNEFLKRGLCVHEAENKEDLSQKLKSSSVFEGSQGNDEIIVVNIQKFKAPNEEKSPNEDPSNSAPKEIISKTELQESIQNSRNLQRVFIIDEAHRSYDPKGCFYANLIECDKTAIKIALTGTPLLEDNAQDKATKNTFGNYLHTYSYTESIKDRHTLKLQLESIETSYKEKLQEIYRLLQESITIEDTEVKKETIFNDEKYINAMLYYIIRDLLDFRRLNDNERLKAMVVCFSSKQARLADCLFNEVQEKVLQENPNLRILNKLKSSLILHDEQEVKEKVHSFKHEDTDIVFVFNMLLTGFDLPSLKRLYIHRELKDHNLLQALARVNRSYKNMSFGYLIDFVGIQENFDKTTDDYLKELNRFNQSGANSDSHIKDMFADRKTLEEDIKNAYDDLFDYPIDDIEGMTSAIVSMSAMNELVKVSRAINTLKERYNLIRTSNDKKILSLKEKIDIEKIHKISSMLHQKAKHLHALKNINEPKNPNDLMILEDLIALLDFKIEFKERKELRFKEQEEITTKQKQAKEILEKIPDQQDKEIQKFYKDFSKLLQTPTTSQNFEEISHSYDAIISQLKQHKEQTTHLLNKYDNDLSYAITNKRLHKHLMEQNISNSAGIFTLLSALKKAIDARIFKRQEILNEEYYLKNAIKAELNNAFKKDPSLKDLEKEKELIIQTLFNELTQNHHQGNPHA

SEQ ID NO: 597 - DNA, 574 bp, Helicobacter pylori
  CDS (26)...(511)
tagaagaatttgaaaggttgctcgcatgcaaagagaattaaggcttttaaataacaagcattgcatggaatacttgcaatttctgtccaaaaaccatttgagttttaaccttttgtgcgaaagagatgcgattgatttttcccccaagctccctaaagaaattcatgaaaaattcggcgcgttagtgctatttgttttagccggatacaccttagaaagcttgataattgatacaaaaagcgtgcaatttgaagccgggtttggccctaataacattggcagtgtggttcaagtaaaacttcctggcatcattcaaatccttatcaaagaaaaaaatgaaaatgccgttttattcaatcgttgcgattcgcttgaattgtttcaaaaagaagattcaatcgcgcaagagccaaaaaaagacgagcgggagtctaaagaatggctggattctaaagaggctcttttttccaattccaaaaaccgcgcgattttagaaaatctgcacaaaagctaaaggaatcattgatgagcgttttgaaattgcatgtaaaagtctttcgttttgaaaccaata

SEQ ID NO: 598 - protein, 162 aa, Helicobacter pylori
MQRELRLLNNKHCMEYLQFLSKNHLSFNLLCERDAIDFSPKLPKEIHEKFGALVLFVLAGYTLESLIIDTKSVQFEAGFGPNNIGSVVQVKLPGIIQILIKEKNENAVLFNRCDSLELFQKEDSIAQEPKKDERESKEWLDSKEALFSNSKNRAILENLHKS

SEQ ID NO: 599 - DNA, 1697 bp, Helicobacter pylori
  CDS (14)...(1648)
tttaggggggtaaatgccttcaaacgctcttttgattgaagaaatcactcatttaatcaatgtttctcatagtagcgtgcataattggatcaaaaccaatcttttagagaaactagaaattgatcataaaatttatgtgaaaacgagttcttttttagatttttgccgcaaccatttagggaaaaacaagcttaacaaatacgctaacaaatccttaaaaggcgtgcataaccatcaagaattgattttaaaatacctagaaatattagaaaatagctctgatctagaaaagttgggttcttattatgaagaagagctttctaacgccaccagaaatttagaaggcatttactacactcctaacaggatagtagaacaacttttcaccctccctaaagattttgatgtctctcaagcgattttttgcgatccggctgtggggagtgggaattttatcatgcatgctttaaaactgggttttaaggttgaaaacatttatggctatgatacggacgcttttgctgtcgctttgactaaaaagcgtattaaagagcgttatcatttagattgccttaatattgtgcaaaaagattttttaaatttaaaacacaccccgcaatttgattgcattttcactaacccgccatggggcaagaaatacaatcaaaaccaaaaagaaaattttaaacagcaattcaacctctctcaaagcctagatagcgcgtcgctcttttttatagcgagtttgaattgtttaaaagaaaacgctcatttggggttattattacccgaaagttgtttgaatattgatgcgtttaaaaaaatgcgagaaatggctttaaagtttcacattagaagcctgattgattttgacaaaccttttaaaaatctaatgactaaggctgtgggtttggcgcttaaaaaaacccctaataaggatcaaaaaatctcatgcttttatcaaaatagcaagttcaaacgctcgccctcttctttttttaacaaccctaaaaagatttttaatatccattgctctagcaaagaaaataaaattttagaccaccttttttccctccctcatatgactttaaaaaataacgctcattttgctttagggattgttacaggcaacaataaagaaaaattacaccccaaacaagaaaaaaataccattcccatttttaggggttcagatattttaaaagacggattaaaagcccctagccaattcattaacgctggtttaaaagactgccagcaagtcgcccccttaagcctttatcaagctagagaaaaaatcgtgtataaattcatttcttcaaagcttgtctttttttatgacaataagcaacgcctttttttaaacagcgcgaacatgtttgttttaaaagaaaatttccctatcaacgctcatgcattaaaagaattgttaaacagcgatttaatgcaattcatttttgaatcgctttttaaaacgcataaaatcttaagaaaagatttggaatgtttgcccctatttgtgcaatttattaacgataattttgatgaaaaattttatttaaaaaatttagggatagaaaaaaaagaccctaaacatttcaccatcaggaaaaatcatgcatgttgcttgtcttttggctttaggggataatctcatcacgcttagccttttaaaagaaatcgctttcaaacagcaa

SEQ ID NO: 600 - protein, 545 aa, Helicobacter pylori
MPSNALLIEEITHLINVSHSSVHNWIKTNLLEKLEIDHKIYVKTSSFLDFCRNHLGKNKLNKYANKSLKGVHNHQELILKYLEILENSSDLEKLGSYYEEELSNATRNLEGIYYTPNRIVEQLFTLPKDFDVSQAIFCDPAVGSGNFIMHALKLGFKVENIYGYDTDAFAVALTKKRIKERYHLDCLNIVQKDFLNLKHTPQFDCIFTNPPWGKKYNQNQKENFKQQFNLSQSLDSASLFFIASLNCLKENAHLGLLLPESCLNIDAFKKMREMALKFHIRSLIDFDKPFKNLMTKAVGLALKKTPNKDQKISCFYQNSKFKRSPSSFFNNPKKIFNIHCSSKENKILDHLFSLPHMTLKNNAHFALGIVTGNNKEKLHPKQEKNTIPIFRGSDILKDGLKAPSQFINAGLKDCQQVAPLSLYQAREKIVYKFISSKLVFFYDNKQRLFLNSANMFVLKENFPINAHALKELLNSDLMQFIFESLFKTHKILRKDLECLPLFVQFINDNFDEKFYLKNLGIEKKDPKHFTIRKNHACCLSFGFRG

SEQ ID NO: 601 - DNA, 1884 bp, Helicobacter pylori
  CDS (46)...(1842)
tattgtgttatacttctaatttcaattttgcttgttaggacatttatgaaaaatattagaaatatcgctgtaatcgcgcatgttgatcatgggaaaaccactctagtagatggcttactttctcaatctggcacatttagtgagagggaaaaagtggatgaaagggtgatggatagcaatgatttggaaagagaaagagggattactatcctgtctaaaaacaccgctatttattacaaagacactaaaatcaatatcattgacactcccgggcatgctgattttgggggcgaagtggagcgcgttttaaaaatggtggatggggtgttgcttttagtggacgctcaagaaggggtcatgcctcaaactaaattcgtggttaaaaaggctttgagttttgggatttgccctattgtggtggtgaataaaattgataagcctgccgctgaaccggacagagtggtggatgaagtttttgacttgttcgtagccatgggggctagcgataagcaattggatttccctgtggtgtatgccgccgcacgagatggctatgcgatgaaaagtttagacgatgaaaagaaaaatttagagcctttgtttgaaacgattttagagcatgtgccaagccctagcgggagcgttgatgagcctttgcaaatgcaaattttcacgcttgattatgacaattatgtgggcaaaatcggtatcgctagggtgtttaatggctcggttaaaaagaatgaaagcgtgctgttgatgaaaagcgatgggagtaaagaaaatggccgtatcactaagcttataggttttttagggctggctaggactgagattgaaaacgcttatgcgggcgatattgtagcgattgccgggtttaatgcaatggatgtgggcgatagcgtcgttgatcctgctaaccccatgcctttagatcccatgcatttagaagagcctacgatgagcgtgtattttgctgtcaatgattcacccttagccgggttagaaggaaagcatgttactgctaataaattgaaagacaggctcttaaaagaaatgcaaaccaatatcgctatgaaatgcgaagaaatgggcgagggcaagtttaaagtgagtgggcgtggggaattgcaaatcactattttagctgaaaacttgcgccgtgaagggtttgaatttagcatttcacgccctgaagtcatcattaaagaagaaaatggcgttaaatgcgagccttttgagcatttagtgattgacacgccccaagattttagtggggctatcattgagagattgggcaaaagaaaagctgagatgaaagcgatgaatcccatgagtgatggctatacaagattagaatttgaaattcctgcaagagggcttatcggttataggagcgagtttttaaccgacaccaagggcgaaggcgtgatgaatcatagctttttagaattccgccctttcagcgggagcgtggaatcgcgcaaaaatggggcgctaatcagcatggaaaatggcgaagcgaccgctttttcccttttcaatatccaagaaagaggcacgctttttatcaacccccaaacgaaggtttatgtgggcatggtcattggcgagcacagccgggataatgatttagatgtcaatcctattaaatccaagcatttaaccaacatgagagcgagcgggagcgatgatgcgatcaaactcaccccgcctaggactatggtgttagaaagagcgttagaatggattgaagaagatgagattttggaagttacccccttgaatttaaggatcaggaaaaagattttagaccctaacatgaggaaaagggcgaaaaaataaatagaattttttggaatgcatgccaatttattcaaccaa

SEQ ID NO: 602 - protein, 599 aa, Helicobacter pylori
MKNIRNIAVIAHVDHGKTTLVDGLLSQSGTFSEREKVDERVMDSNDLERERGITILSKNTAIYYKDTKINIIDTPGHADFGGEVERVLKMVDGVLLLVDAQEGVMPQTKFVVKKALSFGICPIVVVNKIDKPAAEPDRVVDEVFDLFVAMGASDKQLDFPVVYAAARDGYAMKSLDDEKKNLEPLFETILEHVPSPSGSVDEPLQMQIFTLDYDNYVGKIGIARVFNGSVKKNESVLLMKSDGSKENGRITKLIGFLGLARTEIENAYAGDIVAIAGFNAMDVGDSVVDPANPMPLDPMHLEEPTMSVYFAVNDSPLAGLEGKHVTANKLKDRLLKEMQTNIAMKCEEMGEGKFKVSGRGELQITILAENLRREGFEFSISRPEVIIKEENGVKCEPFEHLVIDTPQDFSGAIIERLGKRKAEMKAMNPMSDGYTRLEFEIPARGLIGYRSEFLTDTKGEGVMNHSFLEFRPFSGSVESRKNGALISMENGEATAFSLFNIQERGTLFINPQTKVYVGMVIGEHSRDNDLDVNPIKSKHLTNMRASGSDDAIKLTPPRTMVLERALEWIEEDEILEVTPLNLRIRKKILDPNMRKRAKK

SEQ ID NO: 603 - DNA, 880 bp, Helicobacter pylori
  CDS (54)...(839)
ttctactaggcggaccaccatgccagagctattctacccttggcaaaagaaaaatggatgaaaaagcgaatctgtttaaagaatatttgcggcttttagatttagtaaaaccaaaaatatttgtttttgaaaatgtggtgggtttaatgtctatgcaaaaagggcaattattcaaacaaatttgtaacgcttttaaagagagagattatattttagagcatgccattttgaacgccctagattatggtgtgcctcaaatgagagaacgagtgattttagtgggcgtgcttaaaagctttaaacaaaaattttacttccctaaacccataaaaacgcatttttctctgaaagacgctttaggggatttaccacccattcaaagcggtgaaaatggtgatgctttaggttatcttaaaaatgcggataatgtttttttggaatttgtgcgaaattctaaagaattaagcgaacatagcagtcctaaaaacaatgaaaaactgataaaaatcatgcaaacgctaaaagacggacagagtaaagatgatttgccagaaagtctgcgtcccaaaagtggttatattaatacctatgccaaaatgtggtgggaaaaaccagcccccaccattacaagaaatttttctaccccaagcagttctaggtgtatccatccaagagactctagagcgttaagcattagagagggggcaagattgcaaagctttcctgataattataaattctgtgggagtggtagcgctaaaagattgcaaattggcaatgccgtgccgcctttattgagtgtagcgctcgcgcaggcggtctttgactttttaaaggggtaagatgtttaacaataatgactttaaggattacagaaaat

SEQ ID NO: 604 - protein, 262 aa, Helicobacter pylori
MDEKANLFKEYLRLLDLVKPKIFVFENVVGLMSMQKGQLFKQICNAFKERDYILEHAILNALDYGVPQMRERVILVGVLKSFKQKFYFPKPIKTHFSLKDALGDLPPIQSGENGDALGYLKNADNVFLEFVRNSKELSEHSSPKNNEKLIKIMQTLKDGQSKDDLPESLRPKSGYINTYAKMWWEKPAPTITRNFSTPSSSRCIHPRDSRALSIREGARLQSFPDNYKFCGSGSAKRLQIGNAVPPLLSVALAQAVFDFLKG

SEQ ID NO: 605 - DNA, 1376 bp, Helicobacter pylori
  CDS (13)...(1338)
tggtagttaagaatgggtaatcatttttctaaattaggatttgttttagccgcattaggaagcgcgataggtttagggcatatctggcgtttcccctacatgactggggtgagtggtgggggtgcttttgttttattgtttttatttttatctttaagcgttggcgcggcgatgtttatcgctgaaatgctattaggacaaagcactcaaaaaaatgtaacagaagcttttaaagagcttgacattaaccccaaaaaacgctggaaatacgcagggcttttgcttgtttctgggccattaatactgactttttacggcacgattttaggttgggtgctttattatttggtgagtgttagttttaatttgcctaacaatatccaagaatctgaacaaatttttactcaaactttgcagtctatagggctacaatccatagggctttttagcgttttattgataaccggatggattgtttctagggggattaaagaaggcattgaaaagctcaatttggttttaatgcccttactctttgctactttttttggtttgcttttctatgcgatgagcatggattctttttctaaagcttttcatttcatgtttgatttcaaaccaaaagatttgacctctcaagtgttcacttattccttggggcaggttttcttttccttaagcatcggtttagggatcaatatcacttacgctgcggttacggataaaacgcagaatttgcttaaaagcactatttgggtggttttatcaggaattctaatttctcttgtggcaggacttatgattttcacttttgtgtttgaatatggggcgaatgtctcacaaggcacagggttaatcttcacttctttaccggtggtttttggccaaatgggagcgataggcattcttgtttcgattcttttcttgctcgcgctcgcttttgctggcatcacttctacggtggctttattggagccaagcgtgatgtatcttaccgaaaggtatcaatactctcgttttaaggttacttggggtcttgtagcactaatttttgtggtaggcgtggtgttgattttctcgctccataaggattataaagattatctcactttctttgaaaaaagtctttttgattggttggattttgcatcaagcaccattatcatgcctttaggcgggatggcaacctttatttttatgggttgggttttgaaaaaagaaaaattgcgtcttttgagcgtgcactttttaggccctaaattgtttgcaacttggtatttcttgcttaaatatatcacccctttaattgtgttttccatttggttgagcaagatttattaaaatatttggcatgggaaaattttctaaattaggct

SEQ ID NO: 606 - protein, 442 aa, Helicobacter pylori
MGNHFSKLGFVLAALGSAIGLGHIWRFPYMTGVSGGGAFVLLFLFLSLSVGAAMFIAEMLLGQSTQKNVTEAFKELDINPKKRWKYAGLLLVSGPLILTFYGTILGWVLYYLVSVSFNLPNNIQESEQIFTQTLQSIGLQSIGLFSVLLITGWIVSRGIKEGIEKLNLVLMPLLFATFFGLLFYAMSMDSFSKAFHFMFDFKPKDLTSQVFTYSLGQVFFSLSIGLGINITYAAVTDKTQNLLKSTIWVVLSGILISLVAGLMIFTFVFEYGANVSQGTGLIFTSLPVVFGQMGAIGILVSILFLLALAFAGITSTVALLEPSVMYLTERYQYSRFKVTWGLVALIFVVGVVLIFSLHKDYKDYLTFFEKSLFDWLDFASSTIIMPLGGMATFIFMGWVLKKEKLRLLSVHFLGPKLFATWYFLLKYITPLIVFSIWLSKIY

SEQ ID NO: 607 - DNA, 1120 bp, Helicobacter pylori
  CDS (17)...(1081)
gaaataaggatgcttgatgaaaagcattttgctctttatgatttttgtagtttgtcagttagaaggcaaaaaattttcacaagataattttaaggtggattataactactatttgcgcaaacaggatttgcacatcattaaaacgcaaaacgatttgtccaattcttggtatctccctccacaaaaagcccccaaagaacattcttgggtggattttgctaaaaaatatttaaacatgatggattatctaggcacttattttctgcctttttatcatagtttcacccccatttttcaatggtaccaccccaatatcaacccgtatcaacgcaatgagtttaagttccaaattagttttagagtgcctgtatttaggcatattctttggactaaaggcacgctgtatttagcttatacccaaactgactggtttcaaatttacaatgacccccaatccgctcccatgcgaatgatgaatttcatgcctgaactcatttatgtttatcctatcaattttaaaccttttgggggtaaaatagggaatttttctgaaatttggataggttggcagcacatttctaatggcgtggggggcgcgcaatgttaccaaccttttaataaagaaggcaatcctgaaaaccagtttccaggacaacctgtaatcgttaaagattataatgggcaaaaagatgtgcgctggggggggtgtcgttcggtgagcgcggggcaacgccctgtgtttcgtttggtgtgggaaaagggaggcctaaaaatcatggtcgcttattggccctatgtcccttatgatcaatccaatcctaatttgattgattacatggggtatggtaacgctaaaattgattacaggagagggcgccaccattttgaattgcagctttatgatattttcacgcaatactggcgttatgatcgctggcatggagctttccgcttaggctatacctatcgcattaacccttttgtggggatttatgcgcagtggtttaacggctatggcgatggcttgtatgaatacgatgttttttccaatcgtataggggtaggaatacgcttaaacccttaaaaaagcgttcttttaygctataattaagaccaaaaa

SEQ ID NO: 608 - protein, 355 aa, Helicobacter pylori
MKSILLFMIFVVCQLEGKKFSQDNFKVDYNYYLRKQDLHIIKTQNDLSNSWYLPPQKAPKEHSWVDFAKKYLNMMDYLGTYFLPFYHSFTPIFQWYHPNINPYQRNEFKFQISFRVPVFRHILWTKGTLYLAYTQTDWFQIYNDPQSAPMRMMNFMPELIYVYPINFKPFGGKIGNFSEIWIGWQHISNGVGGAQCYQPFNKEGNPENQFPGQPVIVKDYNGQKDVRWGGCRSVSAGQRPVFRLVWEKGGLKIMVAYWPYVPYDQSNPNLIDYMGYGNAKIDYRRGRHHFELQLYDIFTQYWRYDRWHGAFRLGYTYRINPFVGIYAQWFNGYGDGLYEYDVFSNRIGVGIRLNP

SEQ ID NO: 609 - DNA, 697 bp, Helicobacter pylori
  CDS (34)...(669)
aaaaaattcattttatcttttagagggtttttaatgtcttattttaagaatgctttcaatcaaaaatctttaatagatgattctagtgtgtatttagagccttgttctagctctaatttcatagaattaaaacgcatgcattataatgaagagaatactaagaaaacatgggatattattaagtctttagacagcgtggcggttttactctatgaaaaagaatccgattgctttgtgattgtgaaacaattccgcccagccatttatgcgcgccgttttcattttaagtgcgatcaagatcaaactattgacggatacacttatgaattgtgcgcagggcttgtggataaagctaataagagtttagaagaaatcgcttgcgaagaagcgctagaagaatgcggttatcaaattagccctaaaaatttagaaaccataggccaattttatagcgcgactgggttgagtgggagtttgcaaacgctctattacgctgaagtgcataagaatttgaaagtttcaaagggtggggggattgataccgaaaggattgaagtgctgtttttagagcgatcaaaagctcttgattttataatggattttcaatacgctaaaaccaccggattgtctttagccattttatggcatttaaaaaagtttaaaaatgtttaaaaggaattttatgttaaggcttttg

SEQ ID NO: 610 - protein, 212 aa, Helicobacter pylori
MSYFKNAFNQKSLIDDSSVYLEPCSSSNFIELKRMHYNEENTKKTWDIIKSLDSVAVLLYEKESDCFVIVKQFRPAIYARRFHFKCDQDQTIDGYTYELCAGLVDKANKSLEEIACEEALEECGYQISPKNLETIGQFYSATGLSGSLQTLYYAEVHKNLKVSKGGGIDTERIEVLFLERSKALDFIMDFQYAKTTGLSLAILWHLKKFKNV

SEQ ID NO: 611 - DNA, 2071 bp, Helicobacter pylori
  CDS (49)...(2022)
tgcgaacaattatgggatgatattataaaaattggtgggaatgataagatgaacggacattttatcggttctattttgtatgtgctagatagtaatacgcactctaacaatacattactcatcattgacggccaacaaaggctcaccactatcacgcttttactcatcgctttaaggaatcatctaagcgaagaagttgaaattttggagaaattttcgcgtaaagaaatagagagctatcttatcaacagcaataaggacggcgataagaaattcaggctcattctttcagagtccgataaagacaccttgctgtctttgattgataaaaacaaaagaaagccgagcgagccttcggtaaaaatagtggaaaattttgaattgtttgaaaaatggatcagtgaaaacaccgacaaactagaaacgatttttaaaggattaaaaaaactcatgatagtttggatttctttagataaaggaaaagatgatcctcaacttatttttgagagcatgaactcaaaagatatcgaactcacgcaaacggatttgatcagaaattatatcgtaatggaaacggaggttgaaaaacaggaagacttttataatcaatattggagggctatggaggagagatttgaacaaaatgaaacattgtttaatcggtttgtccggcattatctcacgatcaaaataggaaagattcccaatgagaaaagagtttatgaagctttcaaggattaccggcaaaaaaaggggatagaaatagaggatttattaaaagatttacaaaaatactgcgggtatttttgccagattgcattcaaaaaagaagacgataaagatttaaacaaggctttaagttttttggtgaatttagagatggatgtgatctatccgctactactagagctttatagcgattataaggatggcgttttatccaagcaggattttatccctattatctatttaatagagagctatatttgcagaagggcggtgtgtgggcttggcacaaatagtctcaataaagtttttccctcttttacaaagcacatccaaaaagatgaatattttaaaagcctaaaggcgcattttgtctgtctgacagaaaaacaaagatttccaaacaatgacgagtttaaaaagctttttattacgatagatttttataagtttaaaaaaaataaatactttcttgaaaggttagaaaattttgacacaaaagaaccggtcgatactcaaaaatgcaatatagaacatataatgcctcaaacccttactccagaatggcaaagggatttgggtgaaaattttcaagcaatacacgagaaatacctccacacaatagggaatctcactctaaccggttataactctaagtatagcaacaattctttccaagaaaaaagagatatggagaagggctttaaacaaagctcattaaaactcaatcaaagtttgaaagatttggaatcttttggcgaaaaagagattgaaaaaagggctagtgatttagcggattgggctttaaagatttggacttacccaattctagaggcagaaacattagaggaatataaacccaaaaaagaaaagaaagaaaagaaagaaaaagaggagtataaactcaagaaagaaaaaaaggtttatgatttaagctcttataagtttagctctgattcaagggaattgtttgatattttaagagaaaagattaaagctcttgatgaaaggataactgaaaaatttaatcaaaaatatatagcttataagttttgtaaaataagttttgtggatattgttgtgcaagaaaaaggcttaaaattgtatttaaaaatgaacttgaatgaattgcaagatgaaataaaggaaaaactaaaaattagagacgtttctaatatcggtcgtccatgcgttggaaacatggaagtagagctagaaacaaaagaaaatatcccttattgtttgggattgatcaagcaggctttagaaaaacagatgggtggtaggaataggcaataaaaacccaacttattcaaaataaagagtataattacaaattacttac

SEQ ID NO: 612 - protein, 658 aa, Helicobacter pylori
MNGHFIGSILYVLDSNTHSNNTLLIIDGQQRLTTITLLLIALRNHLSEEVEILEKFSRKEIESYLINSNKDGDKKFRLILSESDKDTLLSLIDKNKRKPSEPSVKIVENFELFEKWISENTDKLETIFKGLKKLMIVWISLDKGKDDPQLIFESMNSKDIELTQTDLIRNYIVMETEVEKQEDFYNQYWRAMEERFEQNETLFNRFVRHYLTIKIGKIPNEKRVYEAFKDYRQKKGIEIEDLLKDLQKYCGYFCQIAFKKEDDKDLNKALSFLVNLEMDVIYPLLLELYSDYKDGVLSKQDFIPIIYLIESYICRRAVCGLGTNSLNKVFPSFTKHIQKDEYFKSLKAHFVCLTEKQRFPNNDEFKKLFITIDFYKFKKNKYFLERLENFDTKEPVDTQKCNIEHIMPQTLTPEWQRDLGENFQAIHEKYLHTIGNLTLTGYNSKYSNNSFQEKRDMEKGFKQSSLKLNQSLKDLESFGEKEIEKRASDLADWALKIWTYPILEAETLEEYKPKKEKKEKKEKEEYKLKKEKKVYDLSSYKFSSDSRELFDILREKIKALDERITEKFNQKYIAYKFCKISFVDIVVQEKGLKLYLKMNLNELQDEIKEKLKIRDVSNIGRPCVGNMEVELETKENIPYCLGLIKQALEKQMGGRNRQ

SEQ ID NO: 613 - DNA, 598 bp, Helicobacter pylori
  CDS (19)...(558)
gtggtggctgagtagaaaatgtttgaagcgacgacgattttaggctatagaggggaattgaatcataaaaagttcgcgctcattggaggcgatgggcaggtaactttgggtaattgcgtggtcaaagccaatgcgacaaaaatcagaagcttgtatcacaaccaggttttaagcgggtttgccggaagcaccgcggacgcttttagtttgtttgatatgtttgaacgcattttagagagcaaaaagggggatttgtttaaaagcgtggtggatttcagtaaagaatggcgcaaagataagtatttacgccgactggaagcgatgatgatcgttttaaacttcgatcacattttcattttgagcggcatgggcgatgttttagaagctgaagacaataagatcgctgctattgggagtggggggaattacgctttaagcgcggctagggctttagatcatttcgctcatttagagcctagaaaacttgtagaagagtccttaaaaatcgcaggggatctttgcatttacaccaacacgaatattaaaattttggagctttaatgtctaaattgaatatgaccccacgagaaattgtcgc

SEQ ID NO: 614 - protein, 180 aa, Helicobacter pylori
MFEATTILGYRGELNHKKFALIGGDGQVTLGNCVVKANATKIRSLYHNQVLSGFAGSTADAFSLFDMFERILESKKGDLFKSVVDFSKEWRKDKYLRRLEAMMIVLNFDHIFILSGMGDVLEAEDNKIAAIGSGGNYALSAARALDHFAHLEPRKLVEESLKIAGDLCIYTNTNIKILEL

SEQ ID NO: 615 - DNA, 450 bp, Helicobacter pylori
  CDS (34)...(396)
tgtttcatagtaacaaattgaaaatataccattatgtatggaggtaatgctatggctgacacaatcaatacaactgaagcaactcatgaaacaaaaaaaccaaacgcttttgtaaattttttcaaaaacaatttgactgataagcgttatgattcattaggtctcattggagcaggggttttatgttgtgtcttgagcggtgctatggggattgttgggataatctttgtcgcaataggaatctttttgtctttttctaatatcaacttagtgaaattagttgaaaaattgtccaaaaaacaatctaaagtgccaacaactgtcaataacgaaactcaaaaatctcaagcaacaagcgttaccaacgaaccaactgaagccaaagagactaaagattgaggcaaaacaacgattttgactgaagaaagaatgagagaaaatttcaaaaat

SEQ ID NO: 616 - protein, 121 aa, Helicobacter pylori
MYGGNAMADTINTTEATHETKKPNAFVNFFKNNLTDKRYDSLGLIGAGVLCCVLSGAMGIVGIIFVAIGIFLSFSNINLVKLVEKLSKKQSKVPTTVNNETQKSQATSVTNEPTEAKETKD

SEQ ID NO: 617 - DNA, 504 bp, Helicobacter pylori
  CDS (69)...(443)
taaccattagtttcaagcagtatgaaaatcttctccatatccatcaaaaaggttgcgacaatgaagtgatgtgcagaacgctcatctctatcgctttgttagaaagctctctagggttgaacaacaggcgagaaaaatcccttaaagacacttcttattccatgtttcatatcaccctaaacaccgctaaaaaattctaccctacctactctaaaacgctcctcaaattcaaattgctaaacgatgtgggttttgcgatccaattagccaaacaaattttaaaagaaaattttgattattacaaacaaaaacaccccaacaaaagcgtgtatcaattagtagaaatggcaataggcgcttacaatgggggaatgaaacacaaccctaatggcgcttacgtgaaaaaattccgttgcatttattctcaagtgcgatataacgagtagagcatactcattttataagcaatcttgatgacacacttctactatcttatgaatttat

SEQ ID NO: 618 - protein, 125 aa, Helicobacter pylori
MCRTLISIALLESSLGLNNRREKSLKDTSYSMFHITLNTAKKFYPTYSKTLLKFKLLNDVGFAIQLAKQILKENFDYYKQKHPNKSVYQLVEMAIGAYNGGMKHNPNGAYVKKFRCIYSQVRYNE

SEQ ID NO: 619 - DNA, 2329 bp, Helicobacter pylori
  CDS (31)...(2274)
attttatatcaaacacaggtagtaggcacaatggaagactttttgtataacaccttatatttcatagaggattataagttggttgttatttttagtttcatagggttaatagcgttattttttctttacaaattcataaaagctcaaaaaaaggcttttaaagataaagctaaccagcctcaaaagaaaaaaagctttaaagaaatcattatagatgggctgaaagaaagggttaaaacctttggcttttggttgcaagctatactattactatcctattcttttatcacatcaggattatttttcttgattctcttaggtaatttttatgatgataatcgatcgcctgagagcgatgatgatctttttgatatatggatctatgcgatacaagattttcctaattactattttaaagcgcttggttttagttcactcaagatttatgggttcaatatatccttagtcgtatatggttctattttatgctcttatatcttcattaccttttttgtgtggttcttaaaatacttaactcggactagagatataggagcgaataaaaaagttgatgatctctttggtagcgcgagttgggaaactgaagagaaaatgatcaaagccaaactcatcacgcccaacaataaaaaacgcgcctttgacaaacgagaggtgattgtaggcaggcgtggcttgggggattttatcgcttacgcagggcaggcgttcattggcttgattgctcctactagaagcggtaagggggtgggtttcatcatgcccaatatgatcaattatcctcaaaatatcgttgtgtttgaccctaaagctgacactatggagacttgcggaaaaatcagagaaaaacgcttcaaccaaaaagtgttcatctatgaacctttctccttaaaaacacaccgatttaatcctttcgcttatgtggattttggtaatgatgtggttttgaccgaagacatactctctcaaattgacacacgcctaaaagggcatggcatggtggctagtggaggggatttttccactcaaatctttggattagcaaagctcgtgttccctgaaagacctaatgaaaaagatcctttctttagcaatcaagcgcgaaatctttttgtcatcaattgcaatatttacagggatctcatgtggactaaaaaggggcttgagtttgtcaaaagaaaaaaaatcatcatgcctgaaacacccacgatgtttttcataggttctatggcaagcgggatcaacttgattgatgaagacacaaacatggaaaaagtcgtgtctttaatggaattttttggaggtgaagaagataagagtggcgataatctaagagtgcttagtcctgccactagaaacatgtggaatagcttcaagacaatgggcggcgctagagaaacttatagctcggttcaaggggtatacacttcagcctttgcgccttataataacgcaatgattagaaatttcacgagcgccaatgattttgatttcaggcgtttaaggatcgatgaagtgagtattggtgtgatcgctaatcctaaagaaagcactattgttggaccgatattagagctgtttttcaatgtgatgatttatagcaatttgattctgccaatccatgatccacagtgcaaaagaagttgcttgatgctcatggacgaattcactttatgtggctatttagagacctttgttaaagcggtagggattatggcagaatacaacatgcgccccgcttttgtgtttcaaagtaaggcgcaactagagaatgaccccccacttggttatggtaggaatggcgctaagactattttagacaacctttctttgaatatgtattatgggattaacaacgataactactatgaacattttgaaaaactttctaaggtattagggaaatacacaaggcaagacgtgagccgaagcattgatgataatacaggtaagaccaacacttctatcagcaacaaagagcggtttttgatgacccctgatgaattgatgactatgggcgatgagcttatcattctagagaatacgctcaaacctatcaagtgccacaaggcgctttactatgatgatccattcttcaccgatgaactcattaaggtaagtccaagcttgagcaagaaatacaaattggggaaagtgcctaatcaagcaactttctatgatgatttgcaagccgctaaaactagaggtgaattgagttatgataaatctttagtgcctgtgggttcaagtgaactgtgattaagacaaaatatcttaacaaaaagaaaattaaaagataatgatataaata

SEQ ID NO: 620 - protein, 748 aa, Helicobacter pylori
MEDFLYNTLYFIEDYKLVVIFSFIGLIALFFLYKFIKAQKKAFKDKANQPQKKKSFKEIIIDGLKERVKTFGFWLQAILLLSYSFITSGLFFLILLGNFYDDNRSPESDDDLFDIWIYAIQDFPNYYFKALGFSSLKIYGFNISLVVYGSILCSYIFITFFVWFLKYLTRTRDIGANKKVDDLFGSASWETEEKMIKAKLITPNNKKRAFDKREVIVGRRGLGDFIAYAGQAFIGLIAPTRSGKGVGFIMPNMINYPQNIVVFDPKADTMETCGKIREKRFNQKVFIYEPFSLKTHRFNPFAYVDFGNDVVLTEDILSQIDTRLKGHGMVASGGDFSTQIFGLAKLVFPERPNEKDPFFSNQARNLFVINCNIYRDLMWTKKGLEFVKRKKIIMPETPTMFFIGSMASGINLIDEDTNMEKVVSLMEFFGGEEDKSGDNLRVLSPATRNMWNSFKTMGGARETYSSVQGVYTSAFAPYNNAMIRNFTSANDFDFRRLRIDEVSIGVIANPKESTIVGPILELFFNVMIYSNLILPIHDPQCKRSCLMLMDEFTLCGYLETFVKAVGIMAEYNMRPAFVFQSKAQLENDPPLGYGRNGAKTILDNLSLNMYYGINNDNYYEHFEKLSKVLGKYTRQDVSRSIDDNTGKTNTSISNKERFLMTPDELMTMGDELIILENTLKPIKCHKALYYDDPFFTDELIKVSPSLSKKYKLGKVPNQATFYDDLQAAKTRGELSYDKSLVPVGSSEL

SEQ ID NO: 621 - DNA, 1037 bp, Helicobacter pylori
  CDS (19)...(1008)
taaatttggaataagaacatgactgaagacagattgagtgcagaagataaaaagtttctagaagtagaaagagctttaaaagaagcggcattaaatcctctaaggcatgctactgaagaactttttggtgattttttaaaaatggaaaatatcactgagatttgttacaatgggaacaaggttgtatgggttttaaaaaataatggcgaatggcaaccatttgatgtgagagacaggaaagcctttagcctgtctcgtttaatgcattttgctcggtgttgtgcaagttttaagaaaaaaacaatagacaactatgaaaatcctattttgagcagcaatttagcgaatggtgaaagggtgcagattgtcctttcccctgttacagttaatgatgaaaccatttccatatccataaggatacctagcaaaacaacctatcctcatagcttctttgaagagcaaggtttttataatctactagacaacaaagaacaagcgatcagcgcgattaaagatggtattgctattggtaaaaatgtgattgtttgtggtggcacaggaagcggtaaaacgacttatatcaaaagcatcatggagtttatccctaaagaagaaaggatcatatccattgaagacaccgaagagattgtattcaaacaccacaaaaactacacacagcttttttttggtgggaatatcacctctgctgattgcttaaagtcatgtctgagaatgcggcctgatagaatcattttaggggaactcagaagcagtgaggcatacgatttttataatgtgctttgtagcggtcataaaggcacactaaccactctgcatgcagggagcagtgaagaagcgtttatccgtttggccaacatgagttcatctaatagcgcagcaaggaatatcaagtttgaaagtcttattgagggctttaaagatttgattgatatgattgtccatatcaaccaccacaaacagtgtgatgaattttatatcaaacacaggtagtaggcacaatggaagactttttgtat

SEQ ID NO: 622 - protein, 330 aa, Helicobacter pylori
MTEDRLSAEDKKFLEVERALKEAALNPLRHATEELFGDFLKMENITEICYNGNKVVWVLKNNGEWQPFDVRDRKAFSLSRLMHFARCCASFKKKTIDNYENPILSSNLANGERVQIVLSPVTVNDETISISIRIPSKTTYPHSFFEEQGFYNLLDNKEQAISAIKDGIAIGKNVIVCGGTGSGKTTYIKSIMEFIPKEERIISIEDTEEIVFKHHKNYTQLFFGGNITSADCLKSCLRMRPDRIILGELRSSEAYDFYNVLCSGHKGTLTTLHAGSSEEAFIRLANMSSSNSAARNIKFESLIEGFKDLIDMIVHINHHKQCDEFYIKHR

SEQ ID NO: 623 - DNA, 5334 bp, Helicobacter pylori
  CDS (22)...(5250)
taaataaaaaggcgttaagacatgaatgaagaaaacgataaacttgaaacttctaaaaaagcccaacaagattcaccccaagatttatccaatgaagaagcaacagaagccaatcattttgaaaatcttttaaaagaatccaaagaaagctcagatcatcatcttgacaaccccacagaaactcaaacccattttgatggagacaagtcagaagaaacccaaactcaaatggattctgaaggtaatgaaacttcagaatctagcaatggcagtctagcagacaagttattcaaaaaagccagaaaattagttgataataaaaaacctttcactcagcaaaagaatttagatgaagaaacccaagaactgaacgaagaagacgatcaagaaaataatgagtatcaagaagaaactcaaacggacttaattgatgatgaaacttctaaaaaaacccaacaacattcaccccaagatttatccaatgaagaagcaacagaagccaatcattttgaaaatcttttaaaagaatccaaagaaagctcagatcatcatcttgacaaccccacagaaactcaaaccaattttgatggagacaagtcagaagaaacccaaactcaaatggattctgaaggtaatgaaacttcagaatctagcaatggcagtctagcagacaagttattcaaaaaagccagaaaattagttgataataaaaaacctttcactcagcaaaagaatttagatgaagaaacccaagaactgaacgaagaagacgatcaagaaaataatgagtatcaagaagaaactcaaacggacttaattgatgatgaaacttctaaaaaaacccaacaacattcaccccaagatttatccaatgaagaagcaacagaagccaatcattttgaaaatcttttaaaagaatccaaagaaagctcagatcatcatcttgacaaccccacagaaactcaaaccaattttgatggagacaagtcagaagaaataactgacgactctaacgatcaagagattatcaaaggaagcaaaaagaaatatattattggtggcattgtagtcgctgttcttatcgtgattattttattttctagaagcatttttcactacttcatgcctttggaagataaaagctctcgttttagcaaagacaggaatctttatgtcaatgatgaaatccaaataaggcaagagtataaccgattgctgaaagaacggaatgaaaaaggcaatatgatcgataagaatcttttcttcaatgacgatcccaatagaaccttatacaactatttgaatattgcagaaattgaggacaaaaacccgttgagagccttttatgaatgtattagtaatggtggcaactatgaagaatgtttgaagcttatcaaagacaaaaaacttcaagatcagatgaaaaagactctagaggcttataacgactgcatcaaaaatgccaaaactgaagaagaaaggatcaagtgtttagatttaatcaaagatgaaaacctaaaaaaaagcttactgaaccaacaaaaagttcaagtggcgctagattgtttgaaaaacgctaaaaccgatgaagaacgaaacgagtgcctaaaactcataaatgaccctgagattagagagaaattccgtaaggaattagagcttcaaaaagagcttcaagagtataaggattgtatcaaaaacgccaaaacagaagctgagaaaaacaaatgcttgaaaggcttgtctaaagaagctatagagagattgaaacagcaagcgctagattgtttgaaaaacgctaaaaccgatgaagaacgaaacgagtgcttgaaaaatattccccaagacttgcaaaaagaactattagctgatatgagcgtcaaggcttacaaggattgcgtatcaaaagctagaaatgaaaaagagaaacaagaatgcgagaaattgctcacgcctgaagcgaggaaaaagttagaacaacaggttctagattgtttgaaaaacgctaaaaccgatgaagaacgaaaaaagtgtttgaaagatctccctaaagacttacaaagcgatattctagccaaagagagcctgaaagcttataaagactgcgtatctcaagccaaaaccgaagctgagaaaaaagaatgcgagaaattactcacccctgaagcgaaaaaacttttagaagaagaagccaaagagagcgttaaggcttatttggattgcgtatctcaagccaaaaccgaagctgagaaaaaagaatgcgagaaattgctcacccctgaagcgaaaaaaaagttagaagaagctaaaaaaagcgttaaagcttacttggattgcgtatcaagagctaggaatgaaaaagagaaaaaagaatgcgagaaattgctcacccctgaagcgaaaaaacttttagagcaacaagcactagattgtttgaaaaacgctaaaaccgataaagaacgaaaaaagtgtttgaaagatctccctaaagacttgcagaaaaaggttttagctaaagaaagcgttaaagcttacttggattgcgtatctcaagccaaaactgaagctgagaaaaaagaatgcgagaaattactcacccctgaagcgagaaaacttttagaagaagctaaaaaaagcgttaaggcttayttggattgcgtatctcaagccaaaactgaagctgagaaaaaagaatgcgagaaattactcacccctgaagcgagaaaactcttagaagaagctaaagagagcgttaaagcttataaagactgcgtatcaaaagctaggaatgaaaaagagaaaaaagaatgcgagaaattactcacgcctgaagcgaaaaaacttttagagcaacaagtgctagattgtttgaaaaacgctaaaaccgaagctgataaaaaaaggtgtgtcaaagatctccctaaagacttgcagaaaaaggttttagctaaagagagcgttaaggcttatttggactgcgtatcaagagctaggaatgaaaaagagaaaaaagaatgcgagaaattgctcacccctgaagcgaaaaaacttttagaagaagccaaagagagtcttaaagcttataaagactgcctctctcaagctagaaatgaagaagaaaggagagcttgcgagaaactactcacgcctgaagcgagaaaactcttagagcaagaagttaagaaaagcattaaggcttatttggactgcgtatcaagagctaggaatgaaaaagagaaaaaagaatgcgagaaattactcacgcctgaagcgagaaaatttttagcgaagcaagtgctaaattgtttggaaaaagctggaaatgaagaagaaagaaaagcatgtcttaaaaatctccctaaagacttacaggaaaatattttagctaaagagagtcttaaagcttataaagactgcctctctcaagctagaaatgaagaagaaaggagagcttgcgagaaactactcacgcctgaagcgagaaaactcttagagcaagaagttaagaaaagcgttaaggcttatttggactgcgtatcaagagctaggaatgaaaaagagaaaaaagaatgcgagaaattactcacgcctgaagcgagaaaatttttagcgaaagaactccaacaaaaagataaagcgatcaaagattgcttgaaaaacgccgatcctaacgacagagcggctatcatgaagtgtttggatggtttgagcgatgaagagaagctcaaatacctgcaagaagctagagaaaaggctgttgcggattgtttggctatggctaaaaccgatgaagaaaaaaggaaatgccaaaacctttatagcgatttgatccaagaaatccaaaataaaaggacacaaaacaaacaaaatcaattgagtaaaacagaaaggttgcatcaagcaagcgagtgcttggataacttagatgaccctactgatcaagaggccatagagcaatgtttagagggcttgagcgatagtgaaagggcgctaattctaggaattaaacgacaagctgatgaagtggatctgatttatagcgatctaagaaaccgtaaaacctttgataacatggcggctaaaggttatccattgttaccaatggatttcaaaaatggcggcgatattgccactattaacgccactaatgttgatgcggacaaaatagctagcgataatcctatttatgcttccatagagcctgatattgccaagcaatacgaaacagaaaaaaccattaaggataagaatttagaagctaaattagctaaggctttaggtggcaataaaaaagatgacgataaagaaaaaagtaaaaaatccacagcagaagctaaagcagaaaacaataagatagacaaagatgtcgcagaaactgccaagaatatcagtgaaatcgctcttaagaacaaaaaagaaaagagtggggaatttgtagatgaaaatggtaatcccattgatgacaaaaagaaagcagaaaaacaagatgaaacaagccctgtcaaacaggcctttataggcaagagtgatcccacatttgttttagcgcaatacacccccattgaaatcactctgacttctaaagtagatgccactctcacaggtatagtgagtggggttgtagccaaagatgtatggaacatgaacggcactatgatcttattagacaaaggcactaaggtgtatgggaattatcaaagcgtgaaaggtggcacacccattatgacacgcttaatgatagtctttactaaagccattacgcctgatggtgtgataatacctctagcaaacgctcaagcagcaggcatgttgggtgaagcaggggtagatggctatgtgaataatcactttatgaagcgcataggctttgctgtgatagcaagcgtggttaatagcttcttgcaaactgcgcctatcatagctctagataaactcataggccttggcaaaggtagaagtgaaaggacacctgaatttaattacgctttgggtcaagctatcaatggtagcatgcaaagttcagctcagatgtctaatcaaattctagggcaactgatgaatatccccccaagtttttacaaaaacgagggcgatagtattaagattctcacaatggacgatattgattttagcggtgtgtatgatgttaaaattactaacaaatctgtggtagatgaaattatcaaacaaagcaccaaaactttgtctagagaacatgaagaaatcaccacaagccccaaaggtggcaattaattcaagagaaaggataaaatatattcatgttactaaactcggttctttacaaaataaaagacaaaaccaacaacaggctct

SEQ ID NO: 624 - protein, 1743 aa, Helicobacter pylori
  VARIANT 876: Xaa = Any Amino Acid
MNEENDKLETSKKAQQDSPQDLSNEEATEANHFENLLKESKESSDHHLDNPTETQTHFDGDKSEETQTQMDSEGNETSESSNGSLADKLFKKARKLVDNKKPFTQQKNLDEETQELNEEDDQENNEYQEETQTDLIDDETSKKTQQHSPQDLSNEEATEANHFENLLKESKESSDHHLDNPTETQTNFDGDKSEETQTQMDSEGNETSESSNGSLADKLFKKARKLVDNKKPFTQQKNLDEETQELNEEDDQENNEYQEETQTDLIDDETSKKTQQHSPQDLSNEEATEANHFENLLKESKESSDHHLDNPTETQTNFDGDKSEEITDDSNDQEIIKGSKKKYIIGGIVVAVLIVIILFSRSIFHYFMPLEDKSSRFSKDRNLYVNDEIQIRQEYNRLLKERNEKGNMIDKNLFFNDDPNRTLYNYLNIAEIEDKNPLRAFYECISNGGNYEECLKLIKDKKLQDQMKKTLEAYNDCIKNAKTEEERIKCLDLIKDENLKKSLLNQQKVQVALDCLKNAKTDEERNECLKLINDPEIREKFRKELELQKELQEYKDCIKNAKTEAEKNKCLKGLSKEAIERLKQQALDCLKNAKTDEERNECLKNIPQDLQKELLADMSVKAYKDCVSKARNEKEKQECEKLLTPEARKKLEQQVLDCLKNAKTDEERKKCLKDLPKDLQSDILAKESLKAYKDCVSQAKTEAEKKECEKLLTPEAKKLLEEEAKESVKAYLDCVSQAKTEAEKKECEKLLTPEAKKKLEEAKKSVKAYLDCVSRARNEKEKKECEKLLTPEAKKLLEQQALDCLKNAKTDKERKKCLKDLPKDLQKKVLAKESVKAYLDCVSQAKTEAEKKECEKLLTPEARKLLEEAKKSVKAXLDCVSQAKTEAEKKECEKLLTPEARKLLEEAKESVKAYKDCVSKARNEKEKKECEKLLTPEAKKLLEQQVLDCLKNAKTEADKKRCVKDLPKDLQKKVLAKESVKAYLDCVSRARNEKEKKECEKLLTPEAKKLLEEAKESLKAYKDCLSQARNEEERRACEKLLTPEARKLLEQEVKKSIKAYLDCVSRARNEKEKKECEKLLTPEARKFLAKQVLNCLEKAGNEEERKACLKNLPKDLQENILAKESLKAYKDCLSQARNEEERRACEKLLTPEARKLLEQEVKKSVKAYLDCVSRARNEKEKKECEKLLTPEARKFLAKELQQKDKAIKDCLKNADPNDRAAIMKCLDGLSDEEKLKYLQEAREKAVADCLAMAKTDEEKRKCQNLYSDLIQEIQNKRTQNKQNQLSKTERLHQASECLDNLDDPTDQEAIEQCLEGLSDSERALILGIKRQADEVDLIYSDLRNRKTFDNMAAKGYPLLPMDFKNGGDIATINATNVDADKIASDNPIYASIEPDIAKQYETEKTIKDKNLEAKLAKALGGNKKDDDKEKSKKSTAEAKAENNKIDKDVAETAKNISEIALKNKKEKSGEFVDENGNPIDDKKKAEKQDETSPVKQAFIGKSDPTFVLAQYTPIEITLTSKVDATLTGIVSGVVAKDVWNMNGTMILLDKGTKVYGNYQSVKGGTPIMTRLMIVFTKAITPDGVIIPLANAQAAGMLGEAGVDGYVNNHFMKRIGFAVIASVVNSFLQTAPIIALDKLIGLGKGRSERTPEFNYALGQAINGSMQSSAQMSNQILGQLMNIPPSFYKNEGDSIKILTMDDIDFSGVYDVKITNKSVVDEIIKQSTKTLSREHEEITTSPKGGN

SEQ ID NO: 625 - DNA, 877 bp, Helicobacter pylori
  CDS (22)...(825)
  misc_feature 806: n = A,T,C or G
aacaaataaaggagtattaaaatgaaacaaagtttgcgcgaacaaaaattattgaaaattttagaaaatgatgtcttgacgattttggatagtttttctaattatctttttgaactgagagaagagttggacttcatagaagaagaaatggaaggtgaaatcaccgaacaaaaccttaccgctctttatgatttttctaatttcttagaagaccatgtcaatgtattttatgagaatgttttgaatatagatgatgtcaaaacagaacacctttattcaggtctcatagatagtcttaacgctaatcttcactttgtcaagtcatttctcagtaatcaggatttagacttccgcttttttaaggaaataaacgatgggcaagatccccaaaaaacattatcaagattaattcctcttcaaagtgggaaaaatgatgcaagctcgtttaaagccaataattcttttgtttcattagtttatgtttatgtttacttcatgctagaaactatcatgcagtcgtataggattctcagattgctagaaaaacctatcaataacaacataagcgaggacatgcagaacgatatagagaatttttttgttcaagcgaattttttagaatactatgttcagaacaaaatatacccaaccaatcatgcctatgacttcacgcatttgatcatggactccattattcctaattggattcaaactgatatgagcgttgaagctaaaaagaaagagctttttgaaaaatattttcaaaacattgatgaagtaacaaacaaaatgctcgatcaaaaaantcaaaacaaaagtaacgattgagtggcgttaatgcgctagaatagtgctaaaaataagaataaaggagtca

SEQ ID NO: 626 - protein, 268 aa, Helicobacter pylori
  VARIANT 262: Xaa = Any Amino Acid
MKQSLREQKLLKILENDVLTILDSFSNYLFELREELDFIEEEMEGEITEQNLTALYDFSNFLEDHVNVFYENVLNIDDVKTEHLYSGLIDSLNANLHFVKSFLSNQDLDFRFFKEINDGQDPQKTLSRLIPLQSGKNDASSFKANNSFVSLVYVYVYFMLETIMQSYRILRLLEKPINNNISEDMQNDIENFFVQANFLEYYVQNKIYPTNHAYDFTHLIMDSIIPNWIQTDMSVEAKKKELFEKYFQNIDEVTNKMLDQKXQNKSND

SEQ ID NO: 627 - DNA, 736 bp, Helicobacter pylori
  CDS (26)...(706)
aaaaaatcaataaaaggggtttagcatgcaagcagtaatttatggcaagcaagtgattatgcaccttctaaactctcatcaagaaaaattgcaagaaatctatctttctaaagaaatagacaagaaactttttttcgcgctcaaaaaagcatgccctaatatcatcaaagtggataataaaaaagcgcaaagcttggctaagggggggaatcatcaaggggttttggctaaggtggaactgcccttagcggtttctttaaaagaggttaaaaaagctcaaaaacttttggtgctttgcgggattacggatgtggggaatattggaggtatttttaggagcgcgtattgcttaggaatgggtggcgttattttagattttgctaaagaattggcttatgaggggattgtgcgatccagcttggggcttatgtatgatttgccttttagcgttatgcctaacacgctggatttaatcaatgaattgaaaacgagcgggtttttatgtttgggcgcgagcatgcaaggctctagtcaaatagaaaatctatccttaaaaaaatgcgctctttttttggggagcgagcatgaggggttgtctaaaaaaatccttgctaaaatggatactatattgagcgtaaaaatgcgaagagattttgattcgctcaatgtgagcgtggcagcagggatcttaatggataaaatcaactaggtggtcaattgaatggaacagaataaa

SEQ ID NO: 628 - protein, 227 aa, Helicobacter pylori
MQAVIYGKQVIMHLLNSHQEKLQEIYLSKEIDKKLFFALKKACPNIIKVDNKKAQSLAKGGNHQGVLAKVELPLAVSLKEVKKAQKLLVLCGITDVGNIGGIFRSAYCLGMGGVILDFAKELAYEGIVRSSLGLMYDLPFSVMPNTLDLINELKTSGFLCLGASMQGSSQIENLSLKKCALFLGSEHEGLSKKILAKMDTILSVKMRRDFDSLNVSVAAGILMDKIN

SEQ ID NO: 629 - DNA, 344 bp, Helicobacter pylori
  CDS (30)...(290)
aaccatgccttttcatcgtctctatcaaaatgttagggtctaaaacatattccgttttaagatcgtatgaaaaaacattctcgcctgaagagctttgcattttaatgggcaaaacatacgaataccccatcatgcttaaagaattattgatgcttttggcaaacgctaggggattgcttgaagccttgaaagtgattttcaacatgcttggcttgtcaaaattaaaagacaaaagcccgttttctttgagagtgttgagcagtttcaaggaatccaaacgccccattacatagaaagccttacgatttttaaacaaacgctctaaaaaaagcttgttcgtatga

SEQ ID NO: 630 - protein, 87 aa, Helicobacter pylori
MLGSKTYSVLRSYEKTFSPEELCILMGKTYEYPIMLKELLMLLANARGLLEALKVIFNMLGLSKLKDKSPFSLRVLSSFKESKRPIT

SEQ ID NO: 631 - DNA, 31 bp, Helicobacter pylori
ctgaattcgaatgaaaagaattttagtctct

SEQ ID NO: 632 - DNA, 29 bp, Helicobacter pylori
ccgctcgagttaaaactcataattcaaat

SEQ ID NO: 633 - DNA, 29 bp, Helicobacter pylori
cgcggatccgaagacatgtgcaaccgatg

SEQ ID NO: 634 - DNA, 30 bp, Helicobacter pylori
ccgctcgagctaaaagttttgcaaaatcac

SEQ ID NO: 635 - DNA, 32 bp, Helicobacter pylori
cgcggatccgattttacttgaaaaatttaaac

SEQ ID NO: 636 - DNA, 31 bp, Helicobacter pylori
ccgctcgagttagaaagtgtagttcaaatac

SEQ ID NO: 637 - DNA, 24 bp, Helicobacter pylori
gcggatccttttcttcaatgtttg

SEQ ID NO: 638 - DNA, 29 bp, Helicobacter pylori
ccgctcgagtcaaagttttaaacaaattc
